(19) United States
(12) Patent Application Publication
(10) Pub. No.: US 2005/0100966 A1
(43) Pub. Date: May 12, 2005

(54) FHOS-interacting proteins and use thereof

(76) Inventors: Takeshi Sakamoto, Asaka (JP); Shizu Takeda, Kawagoe (JP)

Correspondence Address: Edwards & Angell, LLP, P.O. Box 55874, Boston, MA, 02205, US

(21) Appl. No.: 10/805,684

(22) Filed: Mar. 19, 2004

Related U.S. Application Data
(60) Provisional application No. 60/455,766, filed on Jun. 3, 2003.
(60) Provisional application No. 60/459,936, filed on Apr. 2, 2003.
(60) Provisional application No. 60/460,103, filed on Apr. 2, 2003.

(51) Int. Cl. C12Q 1/68; G01N 33/53; C12N 9/64; C07K 14/00

(52) U.S. Cl. 435/7.1; 435/226; 530/350

(57) ABSTRACT

Protein complexes are provided comprising FHOS and one or more proteins selected from the group consisting of GROUP1. Methods of using the protein complexes in diagnosing diseases and disorders are also provided. In addition, the protein complexes are also useful in screening assays for identifying compounds effective in treating and/or preventing diseases and disorders associated with FHOS and its interactors.

### RELATED APPLICATIONS

[0001] This application claims priority to U.S. Provisional Application 60/455,766, filed Mar. 19, 2003; U.S. Provisional Application 60/459,936, filed Apr. 2, 2003; and U.S. Provisional Application 60/460,103 filed Apr. 2, 2003.

### FIELD OF THE INVENTION

[0002] The present invention generally relates to protein-protein interactions, particularly to protein complexes formed by protein-protein interactions and methods of use thereof.

### BACKGROUND OF THE INVENTION

[0003] The prolific output from numerous genomic sequencing efforts, including the Human Genome Project, is creating an ever-expanding foundation for large-scale study of protein function. Indeed, this emerging field of proteomics can appropriately be viewed as a bridge that connects DNA sequence information to the physiology and pathology of intact organisms. As such, proteomics—the large-scale study of protein function—will likely be starting point for the development of many future pharmaceuticals. The efficiency of drug development will therefore depend on the diversity and robustness of the methods used to elucidate protein function, i.e., the proteomic tools, that are available.

[0004] Several approaches are generally known in the art for studying protein function. One method is to analyze the DNA sequence of a particular gene and the amino acid sequence coded by the gene in the context of sequences of genes with known functions. Generally, similar functions can be predicted based on sequence homologies. This “homology method” has been widely used, and powerful computer programs have been designed to facilitate homology analysis. See, e.g., Altschul et al., Nucleic Acids Res., 25:3389-3402 (1997). However, this method is useful only when the function of a homologous protein is known.

[0005] Another useful approach is to interfere with the expression of a particular gene in a cell or organism and examine the consequent phenotypic effects. For example, Fire et al., Nature, 391:806-811 (1998) disclose an “RNA interference” assay in which double-stranded RNA transcripts of a particular gene are injected into cells or organisms to determine the phenotypes caused by the exogenous RNA. Alternatively, transgenic technologies can be utilized to delete or “knock out” a particular gene in an organism and the effect of the gene knockout is determined. See e.g., Winzeler et al., Science, 285:901-906 (1999); Zambrowicz et al., Nature, 392:608-611 (1998). The phenotypic effects resulting from the disruption of expression of a particular gene can shed some light on the functions of the gene. However, the techniques involved are complex and the time required for a phenotype to appear can be long, especially in animals. In addition, in many cases disruption of a particular gene may not cause any detectable phenotypic effect.

[0006] Gene functions can also be uncovered by genetic linkage analysis. For example, genes responsible for certain diseases may be identified by positional cloning. Alternatively, gene function may be inferred by comparing genetic variations among individuals in a population and correlating particular phenotypes with the genetic variations. Such linkage analyses are powerful tools, particularly when genetic variations exist in a traceable population from which samples are readily obtainable. However, readily identifiable genetic diseases are rare and samples from a large population with genetic variations are not easily accessible. In addition, it is also possible that a gene identified in a linkage analysis does not contribute to the associated disease or symptom but rather is simply linked to unknown genetic variations that cause the phenotypic defects.

[0007] With the advance of bioinformatics and publication of the full genome sequence of many organisms, computational methods have also been developed to assign protein functions by comparative genome analysis. For example, Pellegrini et al., Proc. Natl. Acad. Sci. U.S.A 96:4285-4288 (1999) discloses a method that constructs a “phylogenetic profile,” which summarizes the presence or absence of a particular protein across a number of organisms as determined by analyzing the genome sequences of the organisms. A protein's function is predicted to be linked to another protein's function if the two proteins share the same phylogenetic profile. Another method, the Rosetta Stone method, is based on the theory that separate proteins in one organism are often expressed as separate domains of a fusion protein in another organism. Because the separate domains in the fusion protein are predictably associated with the same function, it can be reasonably predicted that the separate proteins are associated with same functions. Therefore, by discovering separate proteins corresponding to a fusion protein, i.e., the “Rosetta Stone sequence,” functional linkage between proteins can be established. See Marcotte et al., Science, 285:751-753(1999); Enright et al., Nature, 402:86-90(1999). Another computational method is the “gene neighbor method.” See Dandekar et al., Trends Biochem. Sci., 23:324-328 (1998); Overbeek et al., Proc. Natl. Acad. Sci. U.S.A 96:2896-2901 (1999). This method is based on the likelihood that if two genes are found to be neighbors in several different genomes, the proteins encoded by the genes share a common function.

[0008] While the methods described above are useful in analyzing protein functions, they are constrained by various practical limitations such as unavailability of suitable samples, inefficient assay procedures, and limited reliability. The computational methods are useful in linking proteins by function. However, they are only applicable to certain proteins, and the linkage maps established therewith are sketchy. That is, the maps lack specific information that describes how proteins function in relation to each other within the functional network. Indeed, none of the methods places the identified protein functions in the context of protein-protein interactions.

[0009] In contrast with the traditional view of protein function, which focuses on the action of a single protein molecule, a modern expanded view of protein function defines a protein as an element in an interaction network. See Eisenberg et al., Nature, 405:823-826 (2000). That is, a full understanding of the functions of a protein will require knowledge of not only the characteristics of the protein itself, but also its interactions or connections with other proteins in the same interacting network. In essence, protein-protein interactions form the basis of almost all biological processes, and each biological process is composed of a network of interacting proteins. For example, cellular structures such as cytoskeletons, nuclear pores, centrosomes, and kinetochores are formed by complex interactions among a multitude of proteins. Many enzymatic reactions are associated with large protein complexes formed by interactions among enzymes, protein substrates, and protein modulators. In addition, protein-protein interactions are also part of the mechanisms for signal transduction and other basic cellular functions such as DNA replication, transcription, and translation. For example, the complex transcription initiation process generally requires protein-protein interactions among numerous transcription factors, RNA polymerase, and other proteins. See e.g., Tjian and Maniatis, Cell, 77:5-8 (1994).

[0010] Because most proteins function through their interactions with other proteins, if a test protein interacts with a known protein, one can reasonably predict that the test protein is associated with the functions of the known protein, e.g., in the same cellular structure or same cellular process as the known protein. Thus, interaction partners can provide an immediate and reliable understanding towards the functions of the interacting proteins. By identifying interacting proteins, a better understanding of disease pathways and the cellular processes that result in diseases may be achieved, and important regulators and potential drug targets in disease pathways can be identified.

[0011] There has been much interest in protein-protein interactions in the field of proteomics. A number of biochemical approaches have been used to identify interacting proteins. These approaches generally employ the affinities between interacting proteins to isolate proteins in a bound state. Examples of such methods include coimmunoprecipitation and copurification, optionally combined with cross-linking to stabilize the binding. Identities of the isolated protein interacting partners can be characterized by, e.g., mass spectrometry. See e.g., Rout et al., J. Cell. Biol., 148:635-651 (2000); Houry et al., Nature, 402:147-154 (1999); Winter et al., Curr Biol., 7:517-529 (1997). A popular approach useful in large-scale screening is the phage display method, in which filamentous bacteriophage particles are made by recombinant DNA technologies to express a peptide or protein of interest fused to a capsid or coat protein of the bacteriophage. A whole library of peptides or proteins of interest can be expressed and a bait protein can be used to screening the library to identify peptides or proteins capable of binding to the bait protein. See e.g., U.S. Pat. Nos. 5,223,409; 5,403,484; 5,571,698; and 5,837,500. Notably, the phage display method only identifies those proteins capable of interacting in an in vitro environment, while the coimmunoprecipitation and copurification methods are not amenable to high throughput screening.

[0012] The yeast two-hybrid system is a genetic method that overcomes certain shortcomings of the above approaches. The yeast two-hybrid system has proven to be a powerful method for the discovery of specific protein interactions in vivo. See generally, Bartel and Fields, eds., The Yeast Two-Hybrid System, Oxford University Press, New York, N.Y., 1997. The yeast two-hybrid technique is based on the fact that the DNA-binding domain and the transcriptional activation domain of a transcriptional activator contained in different fusion proteins can still activate gene transcription when they are brought into proximity to each other. In a yeast two-hybrid system, two fusion proteins are expressed in yeast cells. One has a DNA-binding domain of a transcriptional activator fused to a test protein. The other, on the other hand, includes a transcriptional activating domain of the transcriptional activator fused to another test protein. If the two test proteins interact with each other in vivo, the two domains of the transcriptional activator are brought together reconstituting the transcriptional activator and activating a reporter gene controlled by the transcriptional activator. See, e.g., U.S. Pat. No. 5,283,173.

[0013] Because of its simplicity, efficiency and reliability, the yeast two-hybrid system has gained tremendous popularity in many areas of research. In addition, yeast cells are eukaryotic cells. The interactions between mammalian proteins detected in the yeast two-hybrid system typically are bona fide interactions that occur in mammalian cells under physiological conditions. As a matter of fact, numerous mammalian protein-protein interactions have been identified using the yeast two-hybrid system. The identified proteins have contributed significantly to the understanding of many signal transduction pathways and other biological processes. For example, the yeast two-hybrid system has been successfully employed in identifying a large number of novel mammalian cell cycle regulators that are important in complex cell cycle regulations. Using known proteins that are important in cell cycle regulation as baits, other proteins involved in cell cycle control were identified by virtue of their ability to interact with the baits. See generally, Hannon et al., in The Yeast Two-Hybrid System, Bartel and Fields, eds., pages 183-196, Oxford University Press, New York, N.Y., 1997. Examples of mammalian cell cycle regulators identified by the yeast two-hybrid system include CDK4/CDK6 inhibitors (e.g., p16, p15, p18 and p19), Rb family members (e.g., p130), Rb phosphatase (e.g., PPI-α2), Rb-binding transcription factors (e.g., E2F-4 and E2F-5), General CDK inhibitors (e.g., p21 and p27), CAK cyclin (e.g., cyclin H), and CDK Thr161 phosphatase (e.g., KAP and CDI1). See id at page 192. “The two-hybrid approach promises to be a useful tool in our ongoing quest for new pieces of the cell cycle puzzle.” See id at page 193.

[0014] The yeast two-hybrid system can be employed to identify proteins that interact with a specific known protein involved in a disease pathway, and thus provide valuable understandings of the disease mechanism. The identified proteins and the protein-protein interactions they participate are potential drug targets for use in identifying new drugs for treating the disease.

### SUMMARY OF THE INVENTION

[0015] The inventor of the present invention has discovered using the yeast two-hybrid system that FHOS specifically interacts with GROUP1. The specific interactions between these proteins and FHOS suggest that FHOS and the FHOS-interacting proteins may be involved in the same biological processes. In addition, the interactions between such FHOS-interacting proteins and FHOS may lead to the formation of protein complexes both in vitro and in vivo, which contain FHOS and one or more of the FHOS-interacting proteins. The protein complexes formed under physiological conditions may mediate the functions and biological activities of FHOS and GROUP1 proteins. For example, they are believed to be involved in signal transduction, cytoskeleton rearrangement, membrane trafficking, cell polarity, cell movement, transcription activation or inhibition, protein synthesis and cell-cycle regulation. Thus, the FHOS-interacting proteins and the protein complexes are potential drug targets for the development of drugs useful in treating or preventing diseases and disorders associated with the FHOS-containing protein complexes or a protein member thereof, or with signal transduction, cytoskeleton rearrangement, membrane trafficking, cell polarity, cell movement, transcription activation or inhibition, protein synthesis and cell-cycle regulation.

[0016] In accordance with a first aspect of the present invention, isolated protein complexes are provided comprising FHOS and one or more FHOS-interacting proteins selected from the group consisting of GROUP1. In addition, homologues, derivatives, and fragments of FHOS and of the FHOS-interacting proteins may also be used in forming protein complexes. In a specific embodiment, fragments of FHOS and the FHOS-interacting proteins corresponding to the protein domains responsible for the interaction between FHOS and the FHOS-interacting proteins are used in forming a protein complex of the present invention. In yet another embodiment, a protein complex is provided from a hybrid protein, which comprises FHOS or a homologue, derivative, or fragment thereof covalently linked, directly or through a linker, to an FHOS-interacting protein selected from the group consisting of GROUP1 or a homologue, derivative, or fragment thereof.

[0017] The protein complexes can be prepared by isolation or purification from tissues and cells or produced by recombinant expression of their protein members. The protein complexes can be incorporated into a protein microchip or microarray, which are useful in large-scale high throughput screening assays involving the protein complexes.

[0018] In accordance with a second aspect of the invention, antibodies are provided which are immunoreactive with a protein complex of the present invention. In one embodiment, an antibody is selectively immunoreactive with a protein complex of the present invention. In another embodiment, a bifunctional antibody is provided which has two different antigen binding sites, each being specific to a different interacting protein member in a protein complex of the present invention. The antibodies of the present invention can take various forms including polyclonal antibodies, monoclonal antibodies, chimeric antibodies, antibody fragments such as Fv fragments, single-chain Fv fragments (scFv), Fab′ fragments, and F(ab′)₂ fragments. Preferably, the antibodies are partially or fully humanized antibodies. The antibodies of the present invention can be readily prepared using procedures generally known in the art. For example, recombinant libraries such as phage display libraries and ribosome display libraries may be used to screen for antibodies with desirable specificities. In addition, various mutagenesis techniques such as site-directed mutagenesis and PCR diversification may be used in combination with the screening assays.

[0019] The present invention also provides detection methods for determining whether there is any aberration in a patient with respect to a protein complex having FHOS and one or more FHOS-interacting protein selected from the group consisting of GROUP1. In one embodiment, the method comprises detecting an aberrant level of the protein complexes of the present invention. Alternatively, the levels of one or more interacting protein members (at protein or cDNA or mRNA level) of a protein complex of the present invention are measured. In addition, the cellular localization, or tissue or organ distribution of a protein complex of the present invention is determined to detect any aberrant localization or distribution of the protein complex. In another embodiment, mutations in one or more interacting protein members of a protein complex of the present invention can be detected. In particular, it is desirable to determine whether the interacting protein members have any mutations that will lead to, or in disequilibrium with, changes in the functional activity of the proteins or changes in their binding affinity to other interacting protein members in forming a protein complex of the present invention. In yet another embodiment, the binding constant of the interacting protein members of one or more protein complexes is determined. A kit may be used for conducting the detection methods of the present invention. Typically, the kit contains reagents useful in any of the above-described embodiments of the detection methods, including, e.g., antibodies specific to a protein complex of the present invention or interacting members thereof, and oligonucleotides selectively hybridizable to the cDNAs or mRNAs encoding one or more interacting protein members of a protein complex. The detection methods may be useful in diagnosing a disease or disorder such as diabetes mellitus, cardiovascular disease, hypertension, nephropathy, acute and chronic inflammatory disorders, autoimmune diseases, cell proliferative disorders, cancers and neurodegenerative disorders, staging the disease or disorder, and identifying a predisposition to the disease or disorder.

[0020] The present invention also provides screening methods for selecting modulators of a protein complex formed between FHOS or a homologue, derivative or fragment thereof and an FHOS-interacting protein selected from the group consisting of GROUP1 or a homologue, derivative, or fragment thereof. Screen methods are also provided for selecting modulators of an FHOS-interacting protein selected from the group consisting of GROUP1. The compounds identified in the screening methods of the present invention can be used in modulating the functions or activities of FHOS, the FHOS-interacting proteins, or the protein complexes of the present invention. They may also be effective in modulating the cellular functions involving FHOS, FHOS-interacting proteins or FHOS-containing protein complexes, and in preventing or ameliorating diseases or disorders such as diabetes mellitus, cardiovascular disease, hypertension, nephropathy, acute and chronic inflammatory disorders, autoimmune diseases, cell proliferative disorders, cancers and neurodegenerative disorders. Thus, test compounds may be screened in an in vitro binding assay to identify compounds capable of binding a protein complex of the present invention or FHOS or an FHOS-interacting protein identified in accordance with the present invention or a homologue, derivative or fragment thereof. In addition, in vitro dissociation assays may also be employed to select compounds capable of dissociating the protein complexes identified in accordance with the present invention. An in vitro screening assay may also be used to identify compounds that trigger or initiate the formation of, or stabilize, a protein complex of the present invention. In preferred embodiments, in vivo assays such as yeast two-hybrid assays and various derivatives thereof, preferably reverse two-hybrid assays, are utilized in identifying compounds that interfere with or disrupt protein-protein interactions between FHOS or a homologue, derivative or fragment thereof and an FHOS-interacting protein or a homologue, derivative or fragment thereof. In addition, systems such as yeast two-hybrid assays are also useful in selecting compounds capable of triggering or initiating, enhancing or stabilizing protein-protein interactions between FHOS or a homologue, derivative or fragment thereof and an FHOS-interacting protein selected from the group consisting of GROUP1 or a homologue, derivative or fragment thereof.

[0021] In accordance with yet another aspect of the present invention, methods are provided for modulating the functions and activities of an FHOS-containing protein complex of the present invention, or interacting protein members thereof. The methods may be used in treating or preventing diseases and disorders such as diabetes mellitus, cardiovascular disease, hypertension, nephropathy, acute and chronic inflammatory disorders, autoimmune diseases, cell proliferative disorders, cancers and neurodegenerative disorders. In one embodiment, the methods comprise reducing the protein complex level and/or inhibiting the functional activities of the protein complex. Alternatively, the level and/or activity of FHOS or one of the FHOS-interacting proteins may be inhibited. Thus, the methods may include administering to a patient an antibody specific to a protein complex or FHOS or an FHOS-interacting protein, an antisense oligo or ribozyme selectively hybridizable to a gene or mRNA encoding FHOS or an FHOS-interacting protein, or a compound identified in a screening assay of the present invention. In addition, gene therapy methods may also be used in reducing the expression of the gene encoding FHOS or an FHOS-interacting protein.

[0022] In another embodiment, the method for modulating the functions and activities of an FHOS-containing protein complex of the present invention or interacting protein members thereof comprise increasing the protein complex level and/or activating the functional activities of the protein complex. Alternatively, the level and/or activity of one of the FHOS-interacting proteins or FHOS may be increased. Thus, a particular FHOS-containing protein complex, FHOS or an FHOS-interacting protein of the present invention may be administered directly to a patient. Or, exogenous genes encoding one or more protein members of an FHOS-containing protein complex may be introduced into a patient by gene therapy techniques. In addition, a patient needing treatment or prevention may also be administered with compounds identified in a screening assay of the present invention capable of triggering or initiating, enhancing or stabilizing protein-protein interactions between FHOS or a homologue, derivative or fragment thereof and an FHOS-interacting protein selected from the group consisting of GROUP1, or a homologue, derivative or fragment thereof.

[0023] The present invention also provides cell and animal models in which one or more of the FHOS-containing protein complexes identified in the present invention are in an aberrant form, e.g., increased or decreased level of the protein complexes, altered interaction between interacting protein members of the protein complexes, and/or altered distribution or localization (e.g., in organs, tissues, cells, or cellular compartments) of the protein complexes. Such cell and animal models are useful tools for studying the disorders and diseases caused by the protein complex aberrations and for testing various methods for treating the diseases and disorders.

[0024] The foregoing and other advantages and features of the invention, and the manner in which the same are accomplished, will become more readily apparent upon consideration of the following detailed description of the invention taken in conjunction with the accompanying examples, which illustrate preferred and exemplary embodiments.

### BRIEF DESCRIPTION OF THE DRAWINGS

[0025] FIG. 1—Full-length Amino Acid Sequence (FHOS) (SEQ ID NO: 27)

[0026] FIG. 2—Full-length Amino Acid Sequence (mRNF23) (SEQ ID NO: 28)

[0027] FIG. 3—Full-length Amino Acid Sequence (mERp59) (SEQ ID NO: 29)

[0028] FIG. 4—Full-length Amino Acid Sequence (mBRD7(621)) (SEQ ID NO: 30)

[0029] FIG. 5—Full-length Amino Acid Sequence (mSPNA1) (SEQ ID NO: 31)

[0030] FIG. 6—Full-length Amino Acid Sequence (mVCP) (SEQ ID NO: 32)

[0031] FIG. 7—Full-length Amino Acid Sequence (mSTAT5A) (SEQ ID NO: 33)

[0032] FIG. 8—Partial Amino Acid Sequence (mTAKEDA009) (SEQ ID NO: 10)

[0033] FIG. 9—Full-length Amino Acid Sequence (mPTRF) (SEQ ID NO: 34)

[0034] FIG. 10—Full-length Amino Acid Sequence (mAK031693) (SEQ ID NO: 35)

[0035] FIG. 11—Full-length Amino Acid Sequence (m1200014P03Rik) (SEQ ID NO: 36)

[0036] FIG. 12—Full-length Amino Acid Sequence (mNNP1) (SEQ ID NO: 37)

[0037] FIG. 13—Partial Amino Acid Sequence (mLOC213473(195)) (SEQ ID NO: 15)

[0038] FIG. 14—Full-length Amino Acid Sequence (mGOLGA3) (SEQ ID NO: 38)

[0039] FIG. 15—Full-length Amino Acid Sequence (mMYG1-pending) (SEQ ID NO: 39)

[0040] FIG. 16—Partial Amino Acid Sequence (mAK044679(668)) (SEQ ID NO: 40)

[0041] FIG. 17—Full-length Amino Acid Sequence (RS21C6) (SEQ ID NO: 41)

[0042] FIG. 18—Full-length Amino Acid Sequence (KIAA0562) (SEQ ID NO: 42)

[0043] FIG. 19—Full-length Amino Acid Sequence (COPB) (SEQ ID NO: 43)

[0044] FIG. 20—Full-length Amino Acid Sequence (MYH7) (SEQ ID NO: 44)

[0045] FIG. 21—Partial Amino Acid Sequence (KIAA1633) (SEQ ID NO: 45)

[0046] FIG. 22—Partial Amino Acid Sequence (KIAA1288(1191)) (SEQ ID NO: 46)

[0047] FIG. 23—Full-length Amino Acid Sequence (mVCL) (SEQ ID NO: 47)

[0048] FIG. 24—Partial cDNA Nucleotide Sequence Encoding the Amino Acid Sequence of SEQ ID NO: 6 (SEQ ID NO: 48)

[0049] FIG. 25—Partial cDNA Nucleotide Sequence Encoding the Amino Acid Sequence of SEQ ID NO: 10 (SEQ ID NO: 49)

[0050] FIG. 26—Partial cDNA Nucleotide Sequence Encoding the Amino Acid Sequence of SEQ ID NO: 25 (SEQ ID NO: 50)

[0051] FIG. 27—Partial Amino Acid Sequence (mBC028274(908)) (SEQ ID NO: 87)

[0052] FIG. 28—Full-length Amino Acid Sequence (mBC026864(777)) (SEQ ID NO: 88)

[0053] FIG. 29—Full-length Amino Acid Sequence (m5730504C04Rik) (SEQ ID NO: 89)

[0054] FIG. 30—Full-length Amino Acid Sequence (mMYH9) (SEQ ID NO: 90)

[0055] FIG. 31—Full-length Amino Acid Sequence (mp116Rip) (SEQ ID NO: 91)

[0056] FIG. 32—Full-length Amino Acid Sequence (TPM3) (SEQ ID NO: 92)

[0057] FIG. 33—Full-length Amino Acid Sequence (MYH6) (SEQ ID NO: 93)

[0058] FIG. 34—Full-length Amino Acid Sequence (mMBLR) (SEQ ID NO: 94)

[0059] FIG. 35—Full-length Amino Acid Sequence (mZFP144) (SEQ ID NO: 95)

[0060] FIG. 36—Full-length Amino Acid Sequence (ZNF144(294)) (SEQ ID NO: 65)

[0061] FIG. 37—Full-length Amino Acid Sequence (14-3-3 epsilon) (SEQ ID NO: 96)

[0062] FIG. 38—Partial Amino Acid Sequence (BF672897(87)) (SEQ ID NO: 69)

[0063] FIG. 39—Full-length Amino Acid Sequence (mCATNB) (SEQ ID NO: 97)

[0064] FIG. 40—Full-length Amino Acid Sequence (mCATNS) (SEQ ID NO: 98)

[0065] FIG. 41—Full-length Amino Acid Sequence (mSWAN) (SEQ ID NO: 99)

[0066] FIG. 42—Partial Amino Acid Sequence (m2300003P22Rik(248)) (SEQ ID NO: 100)

[0067] FIG. 43—Partial Amino Acid Sequence (mTAKEDA015) (SEQ ID NO: 75)

[0068] FIG. 44—Full-length Amino Acid Sequence (PCNT2) (SEQ ID NO: 101)

[0069] FIG. 45—Full-length Amino Acid Sequence (KPNA4) (SEQ ID NO: 102)

[0070] FIG. 46—Full-length Amino Acid Sequence (MAPKAP1) (SEQ ID NO: 103)

[0071] FIG. 47—Full-length Amino Acid Sequence (mTPT1) (SEQ ID NO: 104)

[0072] FIG. 48—Partial Amino Acid Sequence (mAK014397(679)) (SEQ ID NO: 105)

[0073] FIG. 49—Full-length Amino Acid Sequence (mHRMT1L1) (SEQ ID NO: 106)

[0074] FIG. 50—Full-length Amino Acid Sequence (HRMT1L1(241)) (SEQ ID NO: 107)

[0075] FIG. 51—Partial Amino Acid Sequence (SAT(204)) (SEQ ID NO: 108)

[0076] FIG. 52—Partial Amino Acid Sequence (BC023995(305)) (SEQ ID NO: 109)

[0077] FIG. 53—Full-length Amino Acid Sequence (TTN) (SEQ ID NO: 110)

[0078] FIG. 54—Partial cDNA Nucleotide Sequence Encoding the Amino Acid Sequence of SEQ ID NO: 57 (SEQ ID NO: 111)

[0079] FIG. 55—Partial cDNA Nucleotide Sequence Encoding the Amino Acid Sequence of SEQ ID NO: 65 (SEQ ID NO: 112)

[0080] FIG. 56—Partial cDNA Nucleotide Sequence Encoding the Amino Acid Sequence of SEQ ID NO: 75 (SEQ ID NO: 113)

[0081] FIG. 57—Partial cDNA Nucleotide Sequence Encoding the Amino Acid Sequence of SEQ ID NO: 82 (SEQ ID NO: 114)

[0082] FIG. 58—Full-length Amino Acid Sequence (mLRRF1P1) (SEQ ID NO: 139)

[0083] FIG. 59—Full-length Amino Acid Sequence (mAPC2) (SEQ ID NO: 140)

[0084] FIG. 60—Full-length Amino Acid Sequence (mCYLN2(1047)) (SEQ ID NO: 141)

[0085] FIG. 61—Full-length Amino Acid Sequence (mACTN3) (SEQ ID NO: 142)

[0086] FIG. 62—Full-length Amino Acid Sequence (mDTNBP1) (SEQ ID NO: 143)

[0087] FIG. 63—Partial Amino Acid Sequence (mTAKEDA013) (SEQ ID NO: 123)

[0088] FIG. 64—Full-length Amino Acid Sequence (m14-3-3g) (SEQ ID NO: 144)

[0089] FIG. 65—Full-length Amino Acid Sequence (m14-3-3zeta) (SEQ ID NO: 145)

[0090] FIG. 66—Full-length Amino Acid Sequence (14-3-3zeta) (SEQ ID NO: 146)

[0091] FIG. 67—Full-length Amino Acid Sequence (m14-3-3b) (SEQ ID NO: 147)

[0092] FIG. 68—Full-length Amino Acid Sequence (m14-3-3theta) (SEQ ID NO: 148)

[0093] FIG. 69—Full-length Amino Acid Sequence (14-3-3theta) (SEQ ID NO: 149)

[0094] FIG. 70—Full-length Amino Acid Sequence (mSPNB2) (SEQ ID NO: 150)

[0095] FIG. 71—Partial Amino Acid Sequence (BC020494(124)) (SEQ ID NO: 132)

[0096] FIG. 72—Full-length Amino Acid Sequence (MACF1) (SEQ ID NO: 151)

[0097] FIG. 73—Full-length Amino Acid Sequence (MYH1) (SEQ ID NO: 152)

[0098] FIG. 74—Full-length Amino Acid Sequence (mPPGB) (SEQ ID NO: 153)

[0099] FIG. 75—Full-length Amino Acid Sequence (mZYX) (SEQ ID NO: 154)

[0100] FIG. 76—Full-length Amino Acid Sequence (mPRKCABP) (SEQ ID NO: 155)

[0101] FIG. 77—Full-length Amino Acid Sequence (mMYLK) (SEQ ID NO: 156)

[0102] FIG. 78—Partial cDNA Nucleotide Sequence Encoding the Amino Acid Sequence of SEQ ID NO: 120 (SEQ ID NO: 157)

[0103] FIG. 79—Partial cDNA Nucleotide Sequence Encoding the Amino Acid Sequence of SEQ ID NO: 123 (SEQ ID NO: 158)

[0104] FIG. 80—Partial cDNA Nucleotide Sequence Encoding the Amino Acid Sequence of SEQ ID NO: 132 (SEQ ID NO: 159)

### DETAILED DESCRIPTION OF THE INVENTION

1. Definitions

[0105] The term “GROUP1” used herein means FHOS-interacting proteins including mRNF23, mERp59, mBRD7(621), mSPNA1, mVCP, mSTAT5A, mTAKEDA009, mPTRF, mAK031693, m1200014P03Rik, mNNP1, mLOC213473(195), mGOLGA3, mMYG1-pending, mAK044679(668), RS21C6, KIAA0562, COPB, MYH7, KIAA1633, KIAA1288(1191), mVCL, mBC028274(908), mBC026864(777), m5730504C04Rik, mMYH9, mp116Rip, TPM3, MYH6, mMBLR, mZFP144, ZNF144(294), 14-3-3epsilon, BF672897(87), mCATNB, mCATNS, mSWAN, m2300003P22Rik(248), mTAKEDA015, PCNT2, KPNA4, MAPKAP1, mTPT1, mAK014397(679), mHRMT1L1, HRMT1L1(241), SAT(204), BC023995(305), TTN, mBC028274(908), mBC026864(777), m5730504C04Rik, mMYH9, mp16Rip, TPM3, MYH6, mMBLR, mZFP144, ZNF144(294), 14-3-3epsilon, BF672897(87), mCATNB, mCATNS, mSWAN, m2300003P22Rik(248), mTAKEDA015, PCNT2, KPNA4, MAPKAP1, mTPT1, mAK014397(679), mHRMT1L1, HRMT1L1(241), SAT(204), BC023995(305), TTN, mLRRF1P1, mAPC2, mCYLN2(1047), mACTN3, mDTNBP1, mTAKEDA013, m14-3-3g, m14-3-3zeta, 14-3-3zeta, m14-3-3b, m14-3-3theta, 14-3-3theta, mSPNB2, BC020494(124), MACF1, MYH1, mPPGB, mZYX, mPRKCABP and mMYLK which have been identified using yeast two-hybrid system in the present invention.

[0106] The term “PROTEIN2” used herein means any one of proteins in GROUP1.

[0107] The terms “polypeptide,” “protein,” and “peptide” are used herein interchangeably to refer to amino acid chains in which the amino acid residues are linked by peptide bonds. The amino acid chains can be of any length of at least two amino acids, including full-length proteins. Unless otherwise specified, the terms “polypeptide,” “protein,” and “peptide” also encompass various modified forms thereof, including but not limited to glycosylated forms, phosphorylated forms, myristoylated forms, palmitoylated forms, ribosylated forms, etc.

[0108] As used herein, the term “interacting” or “interaction” means that two protein domains or complete proteins exhibit sufficient physical affinity to each other so as to bring the two “interacting” protein domains or proteins physically close to each other. An extreme case of interaction is the formation of a chemical bond that results in continual and stable proximity of the two domains. Interactions that are based solely on physical affinities, although usually more dynamic than chemically bonded interactions, can be equally effective in co-localizing two proteins. Examples of physical affinities and chemical bonds include but are not limited to, forces caused by electrical charge differences, hydrophobicity, hydrogen bonds, Vander-waals force, ionic force, covalent linkages, and combinations thereof. The state of proximity between the interacting domains or entities may be transient or permanent, reversible or irreversible. In any event, it is in contrast to and distinguishable from contact caused by natural random movement of two entities. Typically although not necessarily, an “interaction” is exhibited by the binding between the interacting domains or entities. Examples of interactions include specific interactions between antigen and antibody, ligand and receptor, enzyme and substrate, and the like.

[0109] An “interaction” between two protein domains or complete proteins can be determined by a number of methods. For example, an interaction can be determined by functional assays such as the two-hybrid systems. Protein-protein interactions can also be determined by various biochemical approaches based on the affinity binding between the two interacting partners. Such biochemical methods generally known in the art include, but are not limited to, protein affinity chromatography, affinity blotting, immunoprecipitation, and the like. The binding constant for two interacting proteins, which reflects the strength or quality of the interaction, can also be determined using methods known in the art. See Phizicky and Fields, Microbiol. Rev., 59:94-123 (1995).

[0110] As used herein, the term “protein complex” means a composite unit that is a combination of two or more proteins formed by interaction between the proteins. Typically but not necessarily, a “protein complex” is formed by the binding of two or more proteins together through specific non-covalent binding affinities. However, covalent bonds may also be present between the interacting partners. For instance, the two interacting partners can be covalently crosslinked so that the protein complex becomes more stable.

[0111] “Isolated” as used herein refers to that altered by the hand of human from its natural state, i.e., it has been altered outside of its natural environment or removed from its original environment, or both. It can be isolated host cells, polynucleotides or polypeptides. For example, a polynucleotide or a polypeptide naturally present in a living organism is not isolated, but the same polynucleotide or polypeptide separated from the coexisting materials of its natural state is isolated. Moreover, a polynucleotide or a polynucleotide encoding a polypeptide, which polynucleotide is introduced into a cell (e.g., a bacterial cell) or an organism by transformation, genetic manipulation or by any other recombinant method is isolated even if it is still present in the cell or organism, which cell or organism may be naturally occurring.

[0112] The term “isolated” when used in reference to nucleic acids (which include gene sequences) of this invention is intended to mean that a nucleic acid molecule is present in a form other than found in nature in its original environment with respect to its association with other molecules. For example, since a naturally existing chromosome includes a long nucleic acid sequence, an “isolated nucleic acid” as used herein means a nucleic acid molecule having only a portion of the nucleic acid sequence in the chromosome but not one or more other portions present on the same chromosome. Thus, for example, an isolated gene typically includes no more than 50 kb, preferably no more than 25 kb, more preferably no more than 10 kb naturally occurring nucleic acid sequence which immediately flanks the gene in the naturally existing chromosome or genomic DNA. However, it is noted that an “isolated nucleic acid” as used herein is distinct from a clone in a conventional library such as genomic DNA library and cDNA library in that the clones in a library is still in admixture with almost all the other nucleic acids in a chromosome or a cell. An isolated nucleic acid can be in a vector. An isolated nucleic acid can also be part of a composition so long as the composition is substantially different from the nucleic acid's original natural environment. In this respect, an isolated nucleic acid can be in a semi-purified state, i.e., in a composition having certain natural cellular components, while it is substantially separated from other naturally occurring nucleic acids and can be readily detected and/or assayed by standard molecular biology techniques. Preferably, an “isolated nucleic acid” is separated from at least 50%, more preferably at least 75%, most preferably at least 90% of other naturally occurring nucleic acids.

[0113] The term “isolated nucleic acid” embraces “purified nucleic acid” which means a specified nucleic acid is in a substantially homogenous preparation of nucleic acid substantially free of other cellular components, other nucleic acids, viral materials, or culture medium, or chemical precursors or by-products associated with chemical reactions for chemical synthesis of nucleic acids. Typically, a “purified nucleic acid” can be obtained by standard nucleic acid purification methods. In a purified nucleic acid, preferably the specified nucleic acid molecule constitutes at least 75%, preferably at least 85, and more preferably at least 95 percent of the total nucleic acids in the preparation. The term “purified nucleic acid” also means nucleic acids prepared from a recombinant host cell (in which the nucleic acids have been recombinantly amplified and/or expressed) or chemically synthesized nucleic acids.

[0114] The term “isolated nucleic acid” also encompasses “recombinant nucleic acid” which is used herein to mean a hybrid nucleic acid produced by recombinant DNA technology having the specified nucleic acid molecule covalently linked to one or more nucleic acid molecules that are not the nucleic acids naturally flanking the specified nucleic acid. Typically, such one or more nucleic acid molecules flanking the specified nucleic acid are no more than 50 kb, preferably no more than 25 kb.

[0115] The term “isolated polypeptide” as used herein means a polypeptide molecule is present in a form other than found in nature in its original environment with respect to its association with other molecules. Typically, an “isolated polypeptide” is separated from at least 50%, more preferably at least 75%, most preferably at least 90% of other naturally co-existing polypeptides in a cell or organism.

[0116] The term “isolated polypeptide” encompasses a “purified polypeptide” which is used herein to mean a specified polypeptide is in a substantially homogenous preparation substantially free of other cellular components, other polypeptides, viral materials, or culture medium, or when the polypeptide is chemically synthesized, chemical precursors or by-products associated with the chemical synthesis. Preferably, in a purified polypeptide, preferably the specified polypeptide molecule constitutes at least 75%, preferably at least 85, and more preferably at least 95 percent of the total polypeptide in the preparation. A “purified polypeptide” can be obtained from natural or recombinant host cells by standard purification techniques, or by chemically synthesis.

[0117] The term “isolated polypeptide” also encompasses a “recombinant polypeptide” which is used herein to mean a hybrid polypeptide produced by recombinant DNA technology or chemical synthesis having a specified polypeptide molecule covalently linked to one or more polypeptide molecules which do not naturally flank the specified polypeptide.

[0118] The term “isolated protein complex” means a protein complex present in a composition or environment that is different from that found in nature in its native or original cellular or body environment. Preferably, an “isolated protein complex” is separated from at least 50%, more preferably at least 75%, most preferably at least 90% of other naturally co-existing cellular or tissue components. Thus, an “isolated protein complex” may also be a naturally existing protein complex in an artificial preparation or a non-native host cell. An “isolated protein complex” may also be a “purified protein complex”, that is, a substantially purified form in a substantially homogenous preparation substantially free of other cellular components, other polypeptides, viral materials, or culture medium, or when the protein components in the protein complex are chemically synthesized, chemical precursors or by-products associated with the chemical synthesis. A “purified protein complex” typically means a preparation containing preferably at least 75%, more preferably at least 85%, and most preferably at least 95% a particular protein complex. A “purified protein complex” may be obtained from natural or recombinant host cells or other body samples by standard purification techniques, or by chemical synthesis.

[0119] The terms “hybrid protein,” “hybrid polypeptide,” “hybrid peptide,” “fusion protein,” “fusion polypeptide,” and “fusion peptide” are used herein interchangeably to mean a non-naturally occurring protein having a specified polypeptide molecule covalently linked to one or more polypeptide molecules which do not naturally link to the specified polypeptide. Thus, a “hybrid protein” may be two naturally occurring proteins or fragments thereof linked together by a covalent linkage. A“hybrid protein” may also be a protein formed by covalently linking two artificial polypeptides together. Typically but not necessarily, the two or more polypeptide molecules are linked or “fused” together by a peptide bond forming a single non-branched polypeptide chain.

[0120] The term “antibody” as used herein encompasses both monoclonal and polyclonal antibodies that fall within any antibody classes, e.g., IgG, IgM, IgA, or derivatives thereof. The term “antibody” also includes antibody fragments including, but not limited to, Fab, F(ab′)₂, and conjugates of such fragments, and single-chain antibodies comprising an antigen recognition epitope. In addition, the term “antibody” also means humanized antibodies, including partially or fully humanized antibodies. An antibody may be obtained from an animal, or from a hybridoma cell line producing a monoclonal antibody, or obtained from cells or libraries recombinantly expressing a gene encoding a particular antibody.

[0121] The term “selectively immunoreactive” as used herein means that an antibody is reactive thus binds to a specific protein or protein complex, but not other similar proteins or fragments or components thereof.

[0122] The term “compound” as used herein encompasses all types of organic or inorganic molecules, including but not limited proteins, peptides, polysaccharides, lipids, nucleic acids, small organic molecules, inorganic compounds, and derivatives thereof.

[0123] The term “small molecule” as used herein refers to acids (for example acetic acid, salicylic acid, ascorbic acid) bases, formamide, amino acids and their derivatives (for example protoheme, cytochrome heme) inorganic molecules (for example phosphoric acid), acetycholine, sugars, prosthetic groups, cofactors and inhibitors (for example, Flavin adenine dinucleotide, riboflavin, NAD, NDP⁺, NADPH, folic acid, methotrexate) aspirin, palmitic acid, caffeine, beta-mercaptoethanol, urea, minerals or vitamins.

2. Protein Complexes

[0124] Novel protein-protein interactions have been discovered and confirmed using yeast two-hybrid system described herein. In particular, after studying the interacting ability of FHOS (bait) with random polypeptides expressed by anonymous cDNA libraries, it has been discovered that FHOS specifically interacts with proteins including GROUP1 (preys). Different fragments or domains of bait and prey proteins were also tested using yeast two-hybrid system to delineate domains or residues important for the interaction. Accordingly, this invention also discloses specific domains or fragments of FHOS capable of interacting with the specific domains or fragments of GROUP1. These details are summarized in Table 1. The amino acid sequences of the bait fragments used in the yeast two-hybrid system described herein are presented in Table 2. The amino acid sequences of the isolated prey fragments are presented in Table 3.

[0125] The sequences for some or all of the interacting proteins in this disclosure are not novel and are available in public databases such as GenBank. See, Tables 1 and 3 for the GenBank Accession Nos. The start and end numbers of the bait and prey fragments indicated in Tables 1-3 are based on the sequences of the corresponding full-length proteins known to one skilled in the art or the corresponding novel proteins of the present invention. These protein sequences are provided in the Figures presented herein.

[0126] Unless specifically referred to as “mouse” under the cDNA library in Table 1, the source is human. For example, as to RS21C6 prey protein, “Adipose” under the cDNA library in Table 1 means human adipose.

[0127] The prey proteins listed in Tables include those that have been isolated from mouse (indicated by the letter “m” in the beginning of the name of protein, e.g., mRNF23, mMYH9 or mLRRF1P1) and those isolated from human samples (without the letter “m” in the beginning of the name of protein, e.g., COPB, TPM3, or 14-3-3zeta).

TABLE 1
BINDING DOMAINS OF FHOS AND ITS INTERACTORS

| | | | Prey protein | | | | | |
|---|---|---|---|---|---|---|---|---|
| | Bait AA | | | | AA | Prey AA | | |
| | Number | | | GB Accession | in | Number | | cDNA |
| Bait Protein | Start | End | Prey Protein | No. | total | Start | End | library |
| FHOS | 1 | 150 | mRNF23 | NM_024468.1 | 488 | 101 | 234 | Mouse |
| (GenBank | | | mERpS9 | J05185.1 | 509 | 23 | 325 | Embryo |
| Accession | | | mBRD7(621) | NA | 621 | 43 | 311 | |
| No. | | | mSPNA1 | NM_011465.2 | 2415 | 454 | 677 | |
| NM_013241) | | | mVCP | NM_009503.1 | 806 | 478 | 797 | |
| 1164 AA in | | | mSTAT5A | NM_011488.1 | 793 | 32 | 319 | |
| total | | | mTAKEDA009 | NA | 116 | 1 | 116 | |
| | | | mPTRF | NM_008986.1 | 392 | 25 | 130 | |
| | | | mAK031693 | AK031693.1 | 439 | 72 | 360 | |
| | | | m1200014P03Rik | NM_029091.1 | 619 | 253 | 546 | |
| | | | mNNP1 | U79774.1 | 494 | 41 | 391 | |
| | | | mLOC213473(195) | XM_135033.1 | 195 | 1 | 195 | |
| | | | mGOLGA3 | NM_008146.2 | 1447 | 820 | 1019 | |
| | | | mMYG1-pending | NM_021713.1 | 380 | 49 | 368 | |
| | | | mAK044679(668) | AK044679.1 | 668 | 1 | 243 | |
| | | | RS21C6 | AF210430.1 | 170 | 69 | 170 | Adipose |
| | | | K1AA0562 | NM_014704.1 | 925 | 264 | 635 | Skeletal |
| | | | COPB | NM_016451.1 | 953 | 306 | 868 | Muscle |
| | 1 | 348 | MYH7 | NM_000257.1 | 1935 | 1250 | 1619 | |
| | | | | | | 820 | 1038 | |
| | 1 | 150 | KIAA1633 | AB046853.1 | 1561 | 243 | 406 | |
| | | | KIAA1288(1191) | NA | 1191 | 652 | 1078 | |
| | 1 | 250 | mVCL | NM_009502.1 | 1066 | 29 | 475 | Mouse |
| | | | | | | | | Embryo |
| | 1 | 348 | mBC028274(908) | BC028274.1 | 908 | 199 | 576 | Mouse |
| | | | | | 908 | 250 | 565 | Embryo |
| | | | mBC026864(777) | NA | 777 | 256 | 417 | |
| | | | m5730504C04Rik | XM_109944.2 | 1236 | 127 | 407 | |
| | | | mMYH9 | NM_022410.1 | 1960 | 853 | 1191 | |
| | | | mp116Rip | U73200.1 | 1024 | 943 | 1024 | |
| | | | TPM3 | NM_152263.1 | 243 | 157 | 243 | Skeletal |
| | | | MYH6 | XM_033377.8 | 1939 | 876 | 1113 | Muscle |
| | 652 | 810 | mMBLR | AB047007.1 | 353 | 41 | 209 | Mouse |
| | | | mZFP144 | NM_009545.1 | 342 | 7 | 304 | Embryo |
| | | | ZNF144(294) | NA | 294 | 1 | 294 | Adipose |
| | 840 | 954 | 14-3-3epsilon | NM_006761.1 | 255 | 44 | 255 | |
| | | | | | | 89 | 249 | |
| | | | | | | 84 | 238 | Skeletal |
| | 652 | 810 | BF672897(87) | BF672897 | 87 | 1 | 87 | Muscle |
| | | | mCATNB | NM_007614.1 | 781 | 28 | 288 | Mouse |
| | 251 | 500 | mCATNS | NM_007615.1 | 911 | 704 | 871 | Embryo |
| | | | mSWAN | AF345334.1 | 1003 | 1 | 162 | |
| | | | | | | 1 | 144 | |
| | | | m2300003P22Rik | NM_026414.1 | 248 | 1 | 188 | |
| | | | (248) | | | | | |
| | | | mTAKEDA015 | NA | 261 | 1 | 261 | |
| | | | PCNT2 | NM_006031.2 | 3336 | 2942 | 3134 | Skeletal |
| | | | KPNA4 | NM_002268.3 | 521 | 107 | 338 | Muscle |
| | | | MAPKAP1 | NM_024117.1 | 486 | 356 | 480 | |
| | 501 | 750 | mTPT1 | NM_009429.1 | 172 | 16 | 172 | Mouse |
| | | | mAK014397(679) | AK014397.1 | 679 | 441 | 640 | Embryo |
| | | | mHRMT1L1 | NM_133182.1 | 448 | 19 | 205 | |
| | | | HRMT1L1(241) | NA | 241 | 2 | 241 | Adipose |
| | | | SAT(204) | NM_002970.1 | 204 | 1 | 186 | |
| | | | BC023995(305) | BC023995.1 | 305 | 1 | 294 | Skeletal |
| | | | | | | 72 | 299 | Muscle |
| | | | TTN | NM_133437.1 | 27118 | 26343 | 26503 | |
| | 810 | 1100 | mLRRFIP1 | NM_008515.1 | 628 | 129 | 328 | Mouse |
| | | | mAPC2 | NM_011789.1 | 2274 | 12 | 148 | Embryo |
| | 840 | 954 | mCYLN2(1047) | NA | 1047 | 631 | 996 | |
| | | | mACTN3 | NM_013456.1 | 900 | 355 | 508 | |
| | | | mDTNBP1 | NM_025772.2 | 352 | 1 | 242 | |
| | | | mTAKEDA013 | NA | 197 | 1 | 197 | |
| | | | m14-3-3g | NM_018871.1 | 247 | 73 | 247 | |
| | | | m14-3-3zeta | NM_011740.1 | 245 | 56 | 245 | |
| | | | 14-3-3zeta | NM_003406.1 | 245 | 19 | 245 | Adipose |
| | | | | | | 20 | 210 | |
| | | | m14-3-3b | AK011389.1 | 246 | 59 | 230 | Mouse |
| | | | m14-3-3theta | NM_011739.1 | 245 | 82 | 245 | Embryo |
| | | | 14-3-3theta | NM_006826.1 | 245 | 81 | 245 | Adipose |
| | | | mSPNB2 | NM_009260.1 | 2154 | 825 | 1032 | Mouse |
| | | | | | | | | Embryo |
| | | | BC020494(124) | NA | 124 | 1 | 124 | Adipose |
| | | | MACF1 | NM_012090.2 | 5430 | 3984 | 4240 | |
| | | | MYH1 | NM_005963.2 | 1939 | 1560 | 1700 | Skeletal |
| | | | | | | | | Muscle |
| | 951 | 1164 | mPPGB | NM_008906.1 | 474 | 32 | 207 | Mouse |
| | | | mZYX | NM_011777.1 | 564 | 230 | 506 | Embryo |
| | 1001 | 1164 | mPRKCABP | XM_122945.1 | 416 | 1 | 382 | Mouse |
| | | | mMYLK | AF335470.1 | 1561 | 568 | 897 | Embryo |

AA: amino acid;
NA: not applicable;
GB: GenBank

[0128] TABLE 2
BAIT SEQUENCES OF FHOS

Bait AA of
FHOS

| | | |
|---|---|---|
| Start | End | Sequence |

| | | |
|---|---|---|
| 1 | 150 | SEQ ID NO: 1 |
| | | MAGGEDRGDGEPVSVVTVRVQYLEDTDPFACANFPEPRRAPTCSLDGAL |
| | | PLGAQIPAVHRLLGAPLKLEDCALQVSPSGYYLDTELSLEEQREMLEGF |
| | | YEEISKGRKPTLILRTQLSVRVNAILEKLYSSSGPELRRSLFSLKQIFQ |
| | | EDK: |
| 1 | 250 | SEQ ID NO: 2 |
| | | MAGGEDRGDGEPVSVVTVRVQYLEDTDPFACANFPEPRRAPTCSLDGAL |
| | | PLGAQIPAVHRLLGAPLKLEDCALQVSPSGYYLDTELSLEEQREMLEGF |
| | | YEEISKGRKPTLILRTQLSVRVNAILEKLYSSSGPELRRSLFSLKQIFQ |
| | | EDKDLVPEFVHSEGLSCLIRVGAAADHNYQSYILRALGQLMLFVDGMLG |
| | | VVAHSDTIQWLYTLCASLSRLVVKTALKLLLVFVEYSENNAPLFIRAVN |
| | | SVATT |
| 1 | 348 | SEQ ID NO: 3 |
| | | MAGGEDRGDGEPVSVVTVRVQYLEDTDPFACANFPEPRRAPTCSLDGAL |
| | | PLGAQIPAVHRLLGAPLKLEDCALQVSPSGYYLDTELSLEEQREMLEGF |
| | | YEEISKGRKPTLILRTQLSVRVNAILEKLYSSSGPELRRSLFSLKQIFQ |
| | | EDKDLVPEFVHSEGLSCLIRVGAAADHNYQSYILRALGQLMLFVDGMLG |
| | | VVAHSDTIQWLYTLCASLSRLVVKTALKLLLVFVEYSENNAPLFIRAVN |
| | | SVATTTGAPPWANLVSILEEKNGADPELLVYTVTLINKTLAALPDQDSF |
| | | YDVTDALEQQGMDTLVQRHLGTAGTDVDLRTQLVLYENALKLEDGDIEE |
| | | APGAG |
| 251 | 500 | SEQ ID NO: 51 |
| | | TGAPPWANLVSILEEKNGADPELLVYTVTLINKTLAALPDQDSFYDVTD |
| | | ALEQQGMDTLVQRHLGTAGTDVDLRTQLVLYENAIKLEDGDIEEAPGAG |
| | | GRRERRKPSSEEGKRSRRSLEGGGCPARAPEPGPTGPASPVGPTSSTGP |
| | | ALLTGPASSPVGPPSGLQASVNLFPTISVAPSADTSSERSIYKARFLEN |
| | | VAAAETEKQVALAQGRAETLAGAMPNEAGGHPDARQLWDSPETAPAART |
| | | PQSPA |
| 501 | 750 | SEQ ID NO: 52 |
| | | PCVLLRAQRSLAPEPKEPLIPASPKAEPIWELPTRAPRLSIGDLDFSDL |
| | | GEDEDQDMLNVESVEAGKDIPAPSPPLPLLSGVPPPPPLPPPPPIKGPF |
| | | PPPPPLPLAAPLPHSVPDSSALPTKRKTVKLFWRDVKLAGGHGVSASRF |
| | | GPGATLWASLDPVSVDTARLEHLFESRAKEVLPSKKAGEGRRTMTTVLD |
| | | PKRTNAINIGLFTLPPVHVIKAALLNFDEFAVSKDGIEKLLTMMPTEEE |
| | | RQKIE |
| 652 | 810 | SEQ ID NO: 53 |
| | | TLWASLDPVSVDTARLEHLFESRAKEVLPSKKAGEGRRTMTTVLDPKRT |
| | | NAINIGLTTLPPVHVIKAALLNFDEFAVSKDGIEKLLTMMPTEEERQKI |
| | | EGAQLANPDIPLGPAENFLMTLASIGGLAARLQLWAFKLDYDSMEREIA |
| | | EPLFDLKVGMEQ |
| 840 | 954 | SEQ ID NO: 54 |
| | | ELSYLEKVSDVKDTVRRQSLLHHLGSLVLQTRPESSDLYSEIPALTRCA |
| | | KVDFEQLTENLGQLERRSRAAEESLRSLAKHELAPALRARLTHFLDQCA |
| | | RRVAMLRIVHRRVCNRF |
| 810 | 1100 | SEQ ID NO: 115 |
| | | QLVQNATFRCILATLLAVGNFLNGSQSSGFELSYLEKVSDVKDTVRRQS |
| | | LLHHLCSLVLQTRPESSDLYSEIPALTRCAKVDFEQLTENLGQLERRSR |
| | | AAEESLRSLAKHELAPALRARLTHFLDQCARRVAMLRIVHRRVCNRFHA |
| | | FLLYLGYTPQAAREVRIMQFCHTLREFALEYRTCRERVLQQQQKQATYR |
| | | ERNKTRGRMITETEKFSGVAGEAPSNPSVPVAVSSGPGRGDADSHASMK |
| | | SLLTSRLEDITHNRRSRGMVQSSSPIMPTVGPSTASPEEPPGSSLP |
| 951 | 1164 | SEQ ID NO: 116 |
| | | CNRFHAFLLYLGYTPQAAREVRIMQFCHTLREFALEYRTCRERVLQQQQ |
| | | KQATYRERNKTRGRMITETEKFSGVAGEAPSNPSVPVAVSSGPGRGDAD |
| | | SHASMKSLLTSRLEDVTTHNRRSRGMVQSSSPIMPTVGPSTASPEEPPG |
| | | SSLPSDTSDEIMDLLVQSVTKSSPRALAARERKRSRGNRKSLRRTLKSG |
| | | LGDDLVQALGLSKGPGLEV |
| 1001 | 1164 | SEQ ID NO: 117 |
| | | QATYRERNKTRGRMITETEKFSGVAGEAPSNPSVPVAVSSGPGRGDADS |
| | | HASMKSLLTSRLEDTTHNRRSRGMVQSSSPIMPTVGPSTASPEEPPGSS |
| | | LPSDTSDEIMDLLVQSVTKSSPRALAARERKRSRGNRKSLRRTLKSGLG |
| | | DDLVQALGLSKGPGLEV |

AA: amino acid

[0129] TABLE 3
PREY SEQUENCES

| | | | |
|---|---|---|---|
| Corresponding | | Total | AA No. |
| Protein Name | FIG. | AA in | in FIG. |

| | | | | | |
|---|---|---|---|---|---|
| (GB Accession No.) | NO. | FIG. | Start | End | Sequence |

| | | | | | |
|---|---|---|---|---|---|
| mRNF23 | 2 | 488 | 101 | 234 | SEQ ID NO: 4 |
| (NM_024468.1) | | | | | IRDESLCSQHHEPLSLFCYEDQEAVCLICAISHTHRPHTVVPMDDATQEYKEKLQKGLEP |
| | | | | | LEQKLQEITCCKASEEKKPGELKRLVESRRQQILKEFEELHRRLDEEQQTLLSRLEEEEQ |
| | | | | | DILQRLRENAAHLG: |
| mERp59 | 3 | 509 | 23 | 325 | SEQ ID NO: 5 |
| (105185.1) | | | | | EEEDNVLVLKKSNFEEALAAHKYLLVEFYAPWCGHCKCKALAPEYAKAAAKLKAEGSEIR |
| | | | | | LAKVDATEESDLAQQYGVRGYPTIKFFKNGDTASPKEYTAGREADDIVNWLKKRTGPAAT |
| | | | | | TLSDTAAAESLVDSSEVTVIGFFKDVESDSAKQFLLAAEAIDDIPFGITSNSGVFSKYQL |
| | | | | | DKDGVVLFKKFDEGRNNFEGEITKEKLLDFIKHNQLPLVIEFTEQTAPKIFGGEIKTHIL |
| | | | | | LFLPRSVSDYDGKLSSFKRAAEGFKGKILFIFINSDHTDNQRILEFFGLKKEECPAVRLI |
| | | | | | TLEEE |
| mBRD7(621) | 4 | 621 | 43 | 311 | SEQ ID NO: 6 |
| (NA) | | | | | GHDSSLFEDRSDHDKHKDRKRKKRKKGEKQAPGEEKGRKRRRVKEDKKKRDRDRAENEVD |
| | | | | | RDLQCHVPIRLDLPPEKPLTSSLAKQEEVEQTPLQEALNQLMRQLQSTMKEKIKNNDYQS |
| | | | | | IEELKDNFKLMCTNAMIYNKPETIYYKAAKKLLHSGMKILSQERIQSLKQSIDFMSDLQK |
| | | | | | TRKQKERTDACQSGEDSGCWQREREDSGDAETQAFRSPAKDNKRKDRDVLEDKWRSSNSE |
| | | | | | REHEQIERVVQESGGKLTRRLANSQCEFE |
| mSPNA1 | 5 | 2415 | 454 | 677 | SEQ ID NO: 7 |
| (NM_011465.2) | | | | | NDWAALLELWDKCQHQYRQCLDFHLFYRDSEQVDSWMSGQEAFLENEDLGNSVGSVEALL |
| | | | | | QKHDDFEEAFTAQEEKIITLDETATKLIDNDHYDSENIAAIRDGLLARRDALRERAATRR |
| | | | | | KLLVDSQLLQQLYQDSDDLKTWINKKKKLADDDDYKDVQNLKSRVQKQQDFEEELAVNEI |
| | | | | | MLNNLEKTGQEMIEDGHYASEAVAARLSEVANLWKELLVATAHK |
| mVCP | 6 | 806 | 478 | 797 | SEQ ID NO: 8 |
| (NM-009503.1) | | | | | DIGGLEDVKRELQELVQYPVEHPDKFLKFGMTPSKGVLFYGPPGCGKTLLAKAIANECQA |
| | | | | | NFISIKGPELLTMWFGESEANVREIFDKARQAAPCVLFFDELDSIAKARGGNIGDGGGAA |
| | | | | | DRVINQILTEMDGMSTKKNVFIIGATNRPDIIDPAILRPGRLDQLIYIPLPDEKSRVAIL |
| | | | | | KANLQKSPVAKDVDLEFLAKMTNGFSGADLTEICQRACKLAIRESIESEIRRERERQTNP |
| | | | | | SAMIEVEEDDPVPEIRRDHFEEAMRFARRSVSDNDIRKYEMFAQTLQQSRGFGSFRFPSG |
| | | | | | NQGGAGPSQGSGGGTGGSVYT |
| mSTAT5A | 7 | 793 | 32 | 319 | SEQ ID NO: 9 |
| (NM_011488.1) | | | | | HYLAQWIESQPWGAIDLDNPQDRGQATQLLEGLVQELQKKAEHQVGEDGFLLKIKLGHYA |
| | | | | | TQLQNTYDRCPMELVRCIRHILYNEQRLVREANNCSSPAGVLVDAMSQKHLQINQRFEEL |
| | | | | | RLITQDTENELKKLQQTQEYFIIQYQESLRIQAQFAQLGQLNPQERMSRETALQQKQVSL |
| | | | | | ETWLQREAQTLQQYRVELAEKHQKTLQLLRKQQTIILDDELIQWKRRQQLAGNGGPPEGS |
| | | | | | LDVLQSWCEKLAEIIWQNRQQIRRAEHLCQQLPIPGPVEEMLAEVNAT |
| mTAKEDA009 | 8 | 116 | 1 | 116 | SEQ ID NO: 10 |
| (NA) | | | | | AIVERRANLLRAEIEELRATLEQTERSRKIAEQELLDASERVQLLHTQNTSLINTKKKLE |
| | | | | | NDVSQLQSEVEEVIQESRNAEEKAKKAITDAAMMAEELKKEQDTSAHLERMKKNME |
| mPTRF | 9 | 392 | 25 | 130 | SEQ ID NO: 11 |
| (NM_008986.1) | | | | | EPTQGEARATEEPSGTDSDELIKSDQVNGVLVLSLLDKIIGAVDQIQLTQAQLEERQAEM |
| | | | | | EGAVQSIQGELSKLGKAHATTSNTVSKLLEKVRKVSVNVKTVRGSL |
| mAK031693 | 10 | 439 | 72 | 360 | SEQ ID NO: 12 |
| | | | | | QYKTKCESQSGFILHLRQLLSRGNTKFEALTVVIQHLLSEREEALKQHKTLSQELVSLRG |
| | | | | | ELVAASSACEKLEKARADLQTAYQEFVQKLDQQHQTDRTELENRIKDLYTAECEKLQSIY |
| | | | | | IEEAEKYKTQLQEQFDNLNAAHETTKLEIEASHSEKVELLKKTYETSLSEIKKSHEMEKK |
| | | | | | SLEDLLNEKQESLEKQINDLKSENDALNERLKSEEQKQLSREKANSKNPQVMYLEQELES |
| | | | | | LKAVLEIKNEKLHQQDMKLMKMEKLVDNNTALVDKLKRFQQENEELNAR |
| mMYGI- | 15 | 380 | 49 | 368 | SEQ ID NO: 17 |
| pending | | | | | HNGTFHCDEALACALLRLLPEYANAEIVRTRDPEKLASCDIVVDVGGEYNPQSHRYDHHQ |
| (NM_021713.1) | | | | | RTFTETMSSLCPGKPWQTKLSSAGLVYLHFGRKLLAQLLGTSEEDSVVDTIYDKMYENFV |
| | | | | | EEVDAVDNGISQWAEGEPRYAMTTTLSARVARLNPTWNQPNQDTEAGFRRAMDLVQEEFL |
| | | | | | QRLNFYQHSWLPARALVEEALAQRFKVDSSGEIVELAKGGCPWKEHLYHLESELSPKVAI |
| | | | | | TFVIYTDQAGQWRVQGVPKEPHSFQSRLPLPEPWRGLRDKALDQVSGIPGCIFVHASGFI |
| | | | | | GGHHTREGALNMARATLAQR |
| mAK044679 | 16 | 668 | 1 | 243 | SEQ ID NO: 18 |
| (668) | | | | | MSSQSMKLPPSNSALPNQALGSIAGLGTQNLNSVRQNGNPNMFGVGNTAAQPRGMQQPPA |
| (AK044679.1) | | | | | QPLSSSQPNLRAQVPPPLLSPQVPVSLLKYAPNNGGLNPLFGPQQVAMLNQLSQLNQLSQ |
| | | | | | ISQLQRLLAQQQRAQSQRSAPSANRQQQDQQGRPLSVQQQMMQQSRQLDPSLLVKQTPPS |
| | | | | | QQPLHQPAMKSFLDNVMPHTITPELQKGPSPVNAFSNFPIGLNSNLNVNMDMNSIKEPQS |
| | | | | | RLR |
| RS21C6 | 17 | 170 | 69 | 170 | SEQ ID NO: 19 |
| (AF210430.1) | | | | | ELFQWKTDGEPGPQGWSPRERAALQEELSDVLIYLVALAARCRVDLPLAVLSKMDINRRR |
| | | | | | YPAHLARSSSRKYTELPHGAISEDQAVGPADIPCDSTGQTST |
| KIAA0562 | 18 | 925 | 264 | 635 | SEQ ID NO: 20 |
| (NM_014704.1) | | | | | EDYDLAKEKKQQMEQYRAEVYEQLELHSLLDAELMRRPFDLPLQPLARSGSPGHQKPMPS |
| | | | | | LPQLEERGTENQFAEPFLQEKPSSYSLTISPQHSAVDPLLPATDPHPKINAESLPYDERP |
| | | | | | LPAIRKHYGEAVVEPEMSNADISDARRGGMLGEPEPLTEKALREASSAIDVLGETLIAEA |
| | | | | | YCKTWSYREDALLALSKKLMEMPVGTPKEDLKNTLRASVFLVRRAIKDIVTSVFQASLKL |
| | | | | | LKMIITQYIPKHKLSKLETAHCVERTIPVLLTRTGDSSARLRVTAANFIQEMALFKEVKS |
| | | | | | LQIIPSYLVQPLKANSSVHLAMSQMGLLARLLKDLGTGSSGFTIDNVMKFSVSALEHRVY |
| | | | | | EVRETAVRIILD |
| COPB | 19 | 953 | 306 | 868 | SEQ ID NO: 21 |
| (NM_016451.1) | | | | | IELKEHPAHERVLQDLVMDILRVLSTPDLEVRKKTLQLALDLVSSRNVEELVIVLKKEVI |
| | | | | | KTNNVSEHEDTDKYRQLLVRTLHSCSVRFPDMAANVIPVLMEFLSDNNEAAAADVLEFVR |
| | | | | | EAIQRFDNLRMLIVEKMLEVFHAIKSVKIYRGALWILGEYCSTKEDIQSVMTEIRRSLGE |
| | | | | | IPIVESEIKKEAGELKPEEEITVGPVQKLVTEMGTYATQSALSSSRPTKKEEDRPPLRGF |
| | | | | | LLDGDFFVAASLAYTTLTKIALRYVALVQEKKKQNSFVAEAMLLMATILHLGKSSLPKKP |
| | | | | | ITDDDVDRISLCLKVLSECSPLMNDIFNKECRQSLSHMLSAKLEEEKLSQKKESEKRNVT |
| | | | | | VQPDDPISFIQLTAKNEMNCKEDQFQLSLLAAMGNTQRKEAADPLASKLNKVTQLTGFSD |
| | | | | | PVYAEAYVHVNQYDIVLDVLVVNQTSDTLQNCTLELATLGDLKLVEKPSPLTLAPHDFAN |
| | | | | | IKANVKVASTENGIIFGNIVYDVSGAASDRNCVVLSDIHIDIMDYIQPATCTDAEFRQMW |
| | | | | | AEFEWENKVTVNTNMVDLNDYLQH |
| MYH7 | 20 | 1935 | 1250 | 1619 | SEQ ID NO: 22 |
| (NM_000257.1) | | | | | RTLEDQMNEHRGKAEETQRSVNDLTSQRAKLQTENGELSRQLDEKEALISQLTRGKLTYT |
| | | | | | QQLEDLKRQLEEEVKAKNALAHALQSARHDGDLLREQYEEETEAKAELQRVLSKANSEVA |
| | | | | | QWRTKYETDAIQRTEELEEAKKKLAQRLQEPEEAVEAVNAKCSSLEKTKHRVPNEIEDLM |
| | | | | | VDVERSNAAAAALDKKQRNFDKILAEWKQKYEESQSELESSQKEARSLSTELFKLKNAYE |
| | | | | | ESLEHLETFKRENKNLQEEISDLTEQLGSSGKTIHELEKVRKQLEAEKMELQSALEEAEA |
| | | | | | SLEHEEGKILRAQLEFNQIKAEIERKLAEKDEEMEQAKRNHLRVVDSLQTSLDAETRSRN |
| | | | | | EALRVKKKME |
| MYH7 | 20 | 1935 | 820 | 1038 | SEQ ID NO: 23 |
| (NM_000257.1) | | | | | ALMGVKNWPWMKLYFKIKPLLKSAEREKEMASMKEEFTRLKEALEKSEARRKELEEKMVS |
| | | | | | LLQEKNDLQLQVQAEQDNLADAEERCDQLIKNKIQLEAKVKEMNERLEDEEEMNAELTAK |
| | | | | | KRKLEDECSELKRDIDDLELTLAKVEKEKHATENKVKNLTEEMAGLDEIIAKLTKEKKAL |
| | | | | | QEAHQQALDDLQAEEDKVNTLTKAKVKLEQQVDDLEGSL |
| KIAA 1633 | 21 | 1561 | 243 | 406 | SEQ ID NO: 24 |
| (AB046853.1) | | | | | DSINNLQAELNKIFALRKQLEQDVLSYQNLRKTLEEQISEIRRREEESFSLYSDQTSYLS |
| | | | | | ICLEENNRFQVEHFSQEELKKKVSDLIQLVKELYTDNQHLKKTIFDLSCMGFQGNGFPDR |
| | | | | | LASTEQTELLASKEDEDTIKIGEDDEINFLSDQHLQQSNEIMKD |
| KIAA1288 | 22 | 1191 | 652 | 1078 | SEQ ID NO: 25 |
| (1191) | | | | | EKQELKQEIMNETFEYGSLFLGSASKTTTTSGRNISKPDSCGLRQIAAPKAKVGPPVSCL |
| (NA) | | | | | RRNSDNRNPSADRAVSPQRIRRVSSSAGNAAVIKYEEKPPKPAFQNGSSGSFYLKPLVSR |
| | | | | | AHVHLMKTPPKGPSRKNLFTALNAVEKSKQKNPRSLCIQPQTAPDALPPEKTLELTPYKT |
| | | | | | KCENQSGFILQLKQLLACGNTKFEALTVVIQHLLSEREEALKQHKTLSQELVNLRGELVT |
| | | | | | ASTTREKLEKARNELQTVYEAFVQQHQAEKTERENRLKEFYTREYEKLRDTYIEEAEKYK |
| | | | | | MQLQEQFGNLNAAHETFKLEIEASHSEKLELLKKAYEASLSEIKKGHEIEKKSLEDLLSE |
| | | | | | KQESLEKQINDLKSENDALNEKLKSEEQKRRAREKANLKNPQIMYLEQELESLKAVLEIK |
| | | | | | NEKLHQQ |
| mVCL | 23 | 1066 | 29 | 475 | SEQ ID NO: 26 |
| (NM_009502.1) | | | | | EGEVDGKAIPDLTAPVAAMQAAVSNLVWVGKETVQTTEDQILKRDMPPAFIKVENACTKL |
| | | | | | VQAAQMLQSDPYSVPARDYLIDGSRGILSGTSDLLLTFDEAEVRKIIRVCKGILEYLTVA |
| | | | | | EVVETMEDLVTYTKNLGPGMTKMAKMIDERQQELTHQEHRVMLVNSMNTVKELLPVLISA |
| | | | | | MKIFVTSKNSKNQGIEEALKNRNFTVEKMSAEINEIIRVLQLTSWDEDAWASKDTEAMKR |
| | | | | | ALASIDSKLNQAKGWLRDPNASPGDAGEQAIRQILDEAGKVGELCAGKERREILGTCKML |
| | | | | | GQMTDQVAGLRARGQGASPVAMQKAQQVSQGLDVLTAKVENAARKLEAMTNSKQSIAKKI |
| | | | | | DAAQNWLADPNGGPEGEEQIRGALAEARKIAELCDDPKVRDDILRSLGEIAALTSKLGDL |
| | | | | | RRQGKGDSPEARALAKQVATALQNLQT |
| mBC028274 | 27 | 908 | 199 | 576 | SEQ ID NO: 55 |
| (908) | | | | | DRKQHLDKTWADAEDLNSQNEAELRRQVEERQQETEHVYELLGNKIQLLQEEPRLAKNEA |
| (BC028274.1) | | | | | TEMETLVEAEKRCNLELSERWTNAAKNREDAAGDQEKPDQYSEALAQRDRRIEELRQSLA |
| | | | | | AQEGLVEQLSQEKQQLLHLLEEPASMEVQPVPKGLPTQQKPDLHETPTTQPPVSESHLAE |
| | | | | | LQDKIQQTEATNKILQEKLNDLSCELKSAQESSQKQDTIIQSLKEMLKSRESETEELYQV |
| | | | | | IEGQNDTMAKLREMLHQSQLGQLHSSEGIAPAQQQVALLDLQSALFCSQLEIQRLQRLVR |
| | | | | | QKERQLADGKRCVQLVEAAAQEREHQKEAAWKHNQELRKALQHLQGELHSKSQQLHVLEA |
| | | | | | EKYNEIRTQGQNIQHLSH |
| | | 908 | 250 | 565 | SEQ ID NO: 56 |
| | | | | | EPRLAKNEATEMETLVEAEKRCNLELSERWTNAAKNREDAAGDQEKPDQYSEALAQRDRR |
| | | | | | IEELRQSLAAQEGLVEQLSQEKRQLLHLLEEPASMEVQPVPKGLPTQQKPDLHETPTTQP |
| | | | | | PVSESHLAELQDKIQQTEATNKILQEKLNDLSCELKSAQESSQKRDTFFIQSLKEMLKSR |
| | | | | | ESETEELYQVVEGQNDTMAKLREMLHQSQLGQLHSSEGIAPAQQQVALLDLQSALFCSQL |
| | | | | | EIQRLQRLVRQKERQLADGKRCVQLVEAAAQEREHQKEAAWKHNQELRKALQHLQGELHS |
| | | | | | KSQQLHVLEAEKYNETR |
| mBC026864 | 28 | 777 | 256 | 417 | SEQ ID NO: 57 |
| (777) | | | | | AAVLGEADDGNLDLDMKSGLENTAALDNQPKGALKKLIYAAKLNASLKALEGERNQVYTQ |
| (NA) | | | | | LSEVDQVKEDLTEHIKSLESKQASLQSEKTEFESESQKLQQKLKVITELYQENEMKLHRK |
| | | | | | LTVEENYRLEKEEKLSKVDEKISHATEELETCRQRAKDLEEE |
| m5730504C04 | 29 | 1236 | 127 | 407 | SEQ ID NO: 58 |
| Rik | | | | | KQTKVEGELEEMERKHQQLLEEKNILAEQLQAETELFAEAEEMRARLAAKKQELEEILHD |
| (XM_109944.2) | | | | | LESRVEEEEERNQILQNEKKKMQAHIQDLEEQLDEEEGARQKLQLEKVTAEAKIKKMEEE |
| | | | | | VLLLEDQNSKFIKEKKLMEDRIAECSSQLAEEEEKAKNLAKIRNKQEVMISDLEERLKKE |
| | | | | | EKTRQELEKAKRKLDGEYIDLQDQIAELQAQVDELKVQLTKKEEELQGALARGDDETLHK |
| | | | | | NNALKVARELQAQIAELQEDIESEKASRNKAEKQKRDLSEE |
| mMYH9 | 30 | 1960 | 853 | 1191 | SEQ ID NO: 59 |
| (NM_022410.1) | | | | | ELTKVREKYLAAENRLTEMETMQSQLMAEKLQLQEQLQAETELCAEAEELRARLTAKEQE |
| | | | | | LEEICHDLEARVEEEEERCQYLQAEKKKMQQNIQELEEQLEEEESARQKLQLEKVTTEAK |
| | | | | | LKKLEEDQIIMEDQNCKLAKEKKLLEDRVAEFTTNLMEEEEKSKSLAKLKNKHEAMITDL |
| | | | | | EERLRREEKQRQELEKTRRKLEGDSTDLSDQIAELQAQIAELKMQLAKKEEESQAALARV |
| | | | | | EEEAAQKNMALKKIRELETQISELQEDLESERASRNKAEKQKRDLGEELEALKTELEDTL |
| | | | | | DSTAAQQELRSKREQEVSILKKTLEDEAKTHEAQIQGMR |
| mp116Rip | 31 | 1024 | 943 | 1024 | SEQ ID NO: 60 |
| (U73200.1) | | | | | IYTELS1AKAKADGDISRLKEQLKAATEALGEKSPEGTTVSGYDIMKSKSNPDFLKKDRS |
| | | | | | CVTRRLRNIRSKSVIEQVSWDN |
| TPM3 | 32 | 243 | 157 | 243 | SEQ ID NO: 61 |
| (NM_152263.1) | | | | | KNVTNNLKSLEAQAEKYSQKEDKYEEEIKILTDKLKEAETRAEFAERSVAKLEKTIDDLE |
| | | | | | DELYAQKLEYKAISEELDHALNDMTSI |
| MYH6 | 33 | 1939 | 876 | 1113 | SEQ ID NO: 62 |
| (XM_033377.8) | | | | | EEKMVSLLQEKNDLQLQVQAEQDNLNDAEERCDQLIKNKIQLEAKVKEMNERLEDEEEMN |
| | | | | | AELTAKKRKLEDECSELKKDIDDLELTLAKVEKEKHATENKVKNLTEEMAGLDEIIAKLT |
| | | | | | KEKKALQEAHQQALDDLQVEEDKVNSLSKSKVKLEQQVDDLEGSLEQEKKVRMDLERAKR |
| | | | | | KLEGDLKLTQESIMDLENDKLQLEEKLKKKEFDINQQNSKIEDEQALALQLQKKLKKN |
| mMBLR | 34 | 353 | 41 | 209 | SEQ ID NO: 63 |
| (AB047007.1) | | | | | APAAGEEGPASLGQAGAAGCSRSRPPALEPERSLGRLRGRFEDYDEELEEEEEMEEEEEE |
| | | | | | EEEMSHFSLRLESGRADSEDEEERLINLVELTPYILCSICKGYLIDATTITECLHTFCKS |
| | | | | | CIVRHFYYSNRGPKCNIVVHQTQPLYNIRLDRQLQDIVYKLVINLEERE |
| mZFP144 | 35 | 342 | 7 | 304 | SEQ ID NO: 64 |
| (NM_009545.1) | | | | | IKITELNPHLMCALCGGYFIDATTIVECLHSFCKTCIVRYLETNKYCPMCDVQVHKTRPL |
| | | | | | LSIRSDKTLQDIVYKLVPGLFKDEMKRRRDFYAAYPLTEVPNGSNEDRGEVLEQEKGALG |
| | | | | | DDEIVSLSIEFYEGVRDREEKKNLTENGDGDKEKTGVRFLRCPAAMTVMHLAKFLRNKMD |
| | | | | | VPSKYKVEILYEDEPLREYYTLMDIAYIYPWRRNGPLPLKYRVQPACKRLTLPTVPTPSE |
| | | | | | GTNTSGASECESVSDKAPSPATLPATSSSLPSPATPSHGSPSSHGPPATHPTSPTPPS |
| ZNF144(294) | 36 | 294 | 1 | 294 | SEQ ID NO: 65 |
| (NA) | | | | | MHRTTRIKITELNPHLMGALCGGYFIDATTIVECLHSFGKTCIVRYLETNKYCPMCDVQV |
| | | | | | HKTRPLLSIRSDKTLQDIVYKLVPGLFKDEMKRRRDFYAAYPLTEVPNGSNEDRGEVLEQ |
| | | | | | EKGALSDDEIVSLSIEFYEGAGDRDEKKGPLENGDGDKEKTGVRFLRCPAAMTVMHLAKF |
| | | | | | LRNKMDVPSKYKVEVLYEDEPLKEYYTLMDIAYIYPWRRNGPLPLKYRVQPACKRLTLAT |
| | | | | | VPTPSEGTNTSGASESSGATTAANGGSLNCLQTPSSTSRGRKMTVNGAPVPPLT |
| ZNF144(294) | 36 | 294 | 1 | 294 | SEQ ID NO: 65 |
| (NA) | | | | | MHRTTRIKITELNPHLMCALCGGYFIDATTIVECLHSFCKTCIVRYLETNKYCPMCDVQV |
| | | | | | HKTRPLLSIRSDKTLQDIVYKLVPGLFKDEMKRRRDFYAAYPLTEVPNGSNEDRGEVLEQ |
| | | | | | EKGALSDDEIVSLSIEFYEGAGDRDEKKGPLENGDGDKEKTGVRFLRCPAAMTVMHLAKF |
| | | | | | LRNKMDVPSKYKVEVLYEDEPLKEYYTLMDIAYIYPWRRNGPLPLKYRVQPACKRLTLAT |
| | | | | | VPTPSEGTNTSGASESSGAYIAANGGSLNCLQTPSSTSRGRKMTVNGAPVPPLT |
| 14-3-3epsilon | 37 | 255 | 44 | 255 | SEQ ID NO: 66 |
| (NM_006761.1) | | | | | LLSVAYKNVIGARRASWRIISSIEQKEENKGGEDKLKMIREYRQMVETELKLICCDILDV |
| | | | | | LDKHLIPAANTGESKVFYYKMKGDYHRYLAEFATGNDRKEAAENSLVAYKAASDIAMTEL |
| | | | | | PPTHPIRLGLALNFSVFYYEILNSPDRACRLAKAAFDDAIAELDTLSEESYKDSTLIMQL |
| | | | | | LRDNLTLWTSDMQGDGEEQNKEALQDVEDENQ |
| | | | 89 | 249 | SEQ ID NO: 67 |
| | | | | | VETELKLIGCDILDVLDKHLIPAANTGESKVFYYKMKGDYHRYLAEFATGNDRKEAAENS |
| | | | | | LVAYKAASDIAMTELPPTHPIRLGLALNFSVFYYEILNSPDRACRLAKAAFDDAIAKLDT |
| | | | | | LSEESYKDSTLIMQLLRDNLTLWTSDMQGDGEEQNKEALQD |
| | | | 84 | 238 | SEQ ID NO: 68 |
| | | | | | EYRQMVETELKLICCDILDVLDKHLIPAANTGESKVFYYKMKGDYHRYLAEFATGNDRKE |
| | | | | | AAENSLVAYKAASDIAMTELPPTHPIRLGLALNFSVFYYEILNSPDRACRLAKAAFDDAI |
| | | | | | AELDTLSEESYKDSTLIMQLLRDNLTLWTSDMQGD |
| mCATNB | 39 | 781 | 28 | 288 | SEQ ID NO: 70 |
| (NM_007614.1) | | | | | QSYLDSGIHSGAThFAPSLSGKGNPEEEDVDTSQVLYEWEQGFSQSFTQEQVADIDGQYA |
| | | | | | MTRAQRVRAAMFPETLDEGMQIPSTQFDAAHPTNVQRLAEPSQMLKHAVVNLINYQDDAE |
| | | | | | LATRAIPELTKLLNDEDQVVVNKAAVMVHQLSKKEASRHAIMRSPQMVSAIVRTMQNTND |
| | | | | | VETARCTAGTLHNLSHHREGLLAIFKSGGIPALVKMLGSPVDSVLFYAIULHNLLLHQEG |
| | | | | | AKMAVRLAGGLQKMVALLNK |
| mCATNS | 40 | 911 | 704 | 871 | SEQ ID NO: 71 |
| (NM_007615.1) | | | | | KALSAIAELLTSEHERVVKAASGALRINLAVDARNKELIGKHAIPNLVKNLPGGQLNSSW |
| | | | | | NFSEDTVVSILNTINEVIAENLEAAKKLRETQGIEKLVLINKSGNRSEKEVRAAALVLQT |
| | | | | | IWGYKELRKPLEKEGWKKSDFQVNINNASRSQSSHSYDDSTLPLIDRNQ |
| mSWAN | 41 | 1003 | 1 | 162 | SEQ ID NO: 72 |
| (AF345334.1) | | | | | MAVVIRLQGLPIVAGTMDIRHFFSGLTIPDGGVHIVGGELGEAFIVFATDEDARLGMMRT |
| | | | | | GGTIKGSKVTLLLSSKTEMQNMIELSRRRFETANLDIPPANASRSGPPPSSGMSSRVNLP |
| | | | | | ATVPNSNNPSPSVVTATTSVHESNKNIQTFSTASVGTAPPSM |
| | | | 1 | 144 | SEQ ID NO: 73 |
| | | | | | MAVVIRLQGLPIVAGTMDIRHFFSGLTIPDGGVHIVGGELGEAFIVFATDEDARLGMMRT |
| | | | | | GGTIKGSKVTLLLSSKTEMQNMIELSRRRFETANLDIPPANASRSGPPPSSGMSSRTNLP |
| | | | | | ATVPNFNNPSPSVVTATITSVHESN |
| m2300003P22 | 42 | 248 | 1 | 188 | SEQ ID NO: 74 |
| Rik(248) | | | | | KEGRREHAFVPEPFTGTNLAPSLWLHRFEVIDDLNHWDHATKLRFLKESLKGDALDVYNG |
| (NM_026414.1) | | | | | LSSQAQGDFSFVKQALLRAFGAPGEAFSEPEEVLFANSMGKGYYLKGKVGHVPVRFLVDS |
| | | | | | GAQVSVVHPALWEEVTDGDLDTLRPFNNVVKVANGAEMKILGVWDTEISLGKTKLKAEFL |
| | | | | | VANASAEE |
| mTAKEDA015 | 43 | 261 | 1 | 261 | SEQ ID NO: 75 |
| (NA) | | | | | SPYSPRGGSNVIQCYRCGDTCKGEVVRVHNNHFHIRCFTCQVCGCGLAQSGFFFKNQEYI |
| | | | | | CAQDYQQLYGTRCDSCRDFITGEVISALGRTYRPKCFVGSLCRKPFPIGDKVTFSGKECV |
| | | | | | CQTGSQSMTSSKPIKIRGPSHCAGCKEEIKHGQSLLALDKQWHVSCFKCQTCSVILTGEY |
| | | | | | ISKDGVPYCESDYHSQFGIKCETCDRYISGRVLEAGGKHYHPTCARCVRCHQMFTEGEEM |
| | | | | | YLTGSEVWHPICKQAARAEKK |
| PCNT2 | 44 | 3336 | 2942 | 3134 | SEQ ID NO: 76 |
| (NM_006031.2) | | | | | ESKDEVPGSRLHLGSARRAAGSDADHLREQQRELEAMRQRLLSAARLLTSFTSQAVDRT |
| | | | | | VNDWTSSNEKAVMSLLHTLEELKSDLSRPTSSQKKMAAELQFQFVDVLLKDNVSLTKAL |
| | | | | | STVTQEKLELSRAVSKLEKLLKHHLQKGCSPGRSERSAWKPDETAPQSSLRRPDPGRLP |
| | | | | | PAASEEAHTSNAKMDK |
| KPNA4 | 45 | 521 | 107 | 338 | SEQ ID NO: 77 |
| (NM_002268.3) | | | | | IDDLIKSGILPILVHCLERDDNPSLQFEAAWALTNIASGTSEQTQAVVQSNAVPLFLRL |
| | | | | | LHSPHQNVCEQAVWALGNIIGDGPQCRDYVISLGVVEPLLSFISPSIPITFLRNVTWVM |
| | | | | | VNLCRHKDPPPPMETIQEILPALGVLIHHTDVNILVDTVWALSYLTDAGNEQIQMVIDS |
| | | | | | GIVPHLVPLLSHQEVKVQTAALRAVGIIVTGTDEQTQVVLNCDALSHFPALLTHP |
| MAPKAP 1 | 46 | 486 | 356 | 480 | SEQ ID NO: 78 |
| (NM_024117.1) | | | | | HRLRFTTDVQLGISGDKVEIDPVTNQKASTKFWIKQKPISIDSDLLCACDLAEEKSPSH |
| | | | | | AIFKLTYLSNHDYKHLYFESDAATVNEIVLKVNYILESRASTARADYFAQKQRKLNRRT |
| | | | | | SFSFQKE |
| mTPT1 | 47 | 172 | 16 | 172 | SEQ ID NO: 79 |
| (NM_009429.1) | | | | | DIYKIREIADGLCLEVEGKMVSRTEGAIDDSLIGGNASAEGPEGEGTESTVVTGVDIVM |
| | | | | | NHHLQETSFTKEAYKKYIKDYMKSLKGKLEEQKPERVKPFMTGAAEQIKHILANFNNYQ |
| | | | | | FFIGENMNPDGMVALLDYREDGVTPFMIFFKDGLEMEKG |
| mAK014397 | 48 | 679 | 441 | 640 | SEQ ID NO: 80 |
| (679) | | | | | MKHNLELTMAEMRQSLEQERDRLIAEVKKQLELEKQQAVDETKKRQWCANCKKEAIFYC |
| (AK014397.1) | | | | | CWNTSYCDYPCQQAHWPEHMKSCTQSATAPQQEADAEASTETGNKSSQGNSSNTQSAPS |
| | | | | | EPASAPKEKEAPAEKSKDSSNSTLDLSGSRETPSSMLLGSNQSSVSKRCDKQPAYTPTT |
| | | | | | TDRQPHPNYPAQKYHSRSSKAGL |
| mHRMT1L1 | 49 | 448 | 19 | 205 | SEQ ID NO: 81 |
| (NM_133182.1) | | | | | EEDPVDYGCEMQLLQDGAQLQLQLQPEEFVAIADYTATDETQLSFLRGEKILILRQTTA |
| | | | | | DWWWGERAGCCGYIPANHLGKQLEEYDPEDTWQDEEYFDSYGTLKLHLGMLADQPRUKY |
| | | | | | HSVILQNKESLKDKVILDVGCGTGIISLFCAHHARPKAVYAVEASDMAQHTSQLVLQNG |
| | | | | | FADTITVFQ |
| HRMTIL1 | 50 | 241 | 2 | 241 | SEQ ID NO: 82 |
| (241) | | | | | ATSGDCPRSESQGEEPAECSEAGLLQEGVQPEEFVAIADYAATDETQLSFLRGEKILIL |
| (NA) | | | | | RQTTADWWWGERAGCCGYIPANYVGKHVDEYDPEDTWQDEEYFGSYGTLKLHLEMLADQ |
| | | | | | PRITKYHSVILQNKESLTDKVILDVGCGTGIISLFCAHYARPRAVYAVEASEMAQHTGQ |
| | | | | | LVLQNGFADIITVYQQKVEDVVLPEKVDVLVSEWMGTCLLKQQSSEGDASKDTTGVLDC |
| | | | | | QQTI |
| SAT(204) | 51 | 204 | 1 | 186 | SEQ ID NO: 83 |
| (NM_002970.1) | | | | | RRGRSRETNEEPPPPTVQVQGPGPQREEKQKTKMAKFVIRPATAADCSDILRLIKELAK |
| | | | | | YEYMEEQVILTEKDLLEDGFGEHPFYHCLVAEVPKEHWTPEGHSIVGFAMYYFTYDPWI |
| | | | | | GKLLYLEDFFVMSDYRGFGIGSEILKNLSQVAMRCRCS SMHFLVAEWNEPSINFYKRR |
| | | | | | GASDLSSEEG |
| BC023995 | 52 | 305 | 1 | 294 | SEQ ID NO: 84 |
| (305) | | | | | FCELSSPAEMANVLCNRARLVSYLPGFCSLVKRVVNPKAFSTAGSSGSDESHVAAAPPD |
| (BC023995.1) | | | | | ICSRTVWPDETMGPFGPQDQRFQLPGNIGFDCHLNGTASQKKSLVHKTLPDVLAEPLSS |
| | | | | | ERHEFVMAQYVNEFQGNDAPVEQEINSAETYFERARVECAIQTCPELLRKDFESLFPEV |
| | | | | | ANGKLMILTVTQKTKNDMTVWSEEVEIEREVLLEKFINGAKEICYALRAEGYWADFIDP |
| | | | | | SSGLAFFGPYTNNTLFETDERYRHLGFSVDDLGCCKVIRHSLWGTHVVVGSIFTNATP |
| | | | 72 | 299 | SEQ ID NO: 85 |
| | | | | | GPFGPQDQRFQLPGNIGFDCHLNGTASQKKSLVHKTLPDVLAEPLSSERHEFVMAQYVN |
| | | | | | EFQGNDAPVEQEINSAETYFESARVECAIQTGPELLRKDFESLFPEVANGKLMILTVTQ |
| | | | | | KTKNDMTVWSEEVEIEREVLLEKFINGAKEICYALRAEGYWADFIDPSSGLAFFGPYTN |
| | | | | | NTLFETDERYRHLGFSVDDLGCCKVIRHSLWGTHVVVGSIFTNATPDSHIM |
| TTN | 53 | 27118 | 26343 | 26503 | SEQ ID NO: 86 |
| (NM_133437.1) | | | | | LTIQKARVTEKAVTSPPRVKSPEPRVKSPEAVKSPKRVKSPEPSHPKAVSPTETKPTPT |
| | | | | | EKVQHLPVSAPPEITQFLKAEASKEIAKLTCVVESSVLRAKEVTWYKDGEKLKENGHFQ |
| | | | | | FHYSADGTYELKINNLTESDQGEYVCEISGEGGTSKANLQFMG |
| mLRRFIP1 | 58 | 628 | 129 | 328 | SEQ ID NO: 118 |
| (NM_008515.1) | | | | | CSNLGLPSSGLASKPLPTQNGSRASMLDESSLYGARRGSACGSRAPSEYGSHLNSSSRA |
| | | | | | SSRASSARASPVVEERPDKDFAEKGSRNMPSLSAATLASLGGTSSRRGSGDTSISMDTE |
| | | | | | ASIREIKELNELKDQIQDVEGKYMQGLKEMKDSLAEVEEKYKKAMVSNAQLDNEKTNFM |
| | | | | | YQVDTLKDMLLELEEQLAESQRQ |
| mAPC2 | 59 | 2274 | 12 | 148 | SEQ ID NO: 119 |
| (NM_011789.1) | | | | | VRQVEALKAENTHLRQELRDNSSHLSKLETETSGMKEVLKHLQGKLEQEARVLVSSGQT |
| | | | | | EVLEQLKALQTDISSLYNLKFHAPALGPEPAARTPEGSPVHGSGPSKDSFGELSRATIR |
| | | | | | LLEELDQERCFLLSEIEKE |
| mCYLN2(1047) | 60 | 1047 | 631 | 996 | SEQ ID NO: 120 |
| (NA) | | | | | DLKATLNSGPGAQQKEIGELKALVEGIKMEHQLELGNLQAKHDLETAMHGKEKEGLRQK |
| | | | | | LQEVQEELAGLQQHWREQLEEQASQHRLELQEAQDQCRDAQLRAQELEGLDVEYRGQAQ |
| | | | | | AIEFLKEQISLAEKKMLDYEMLQRAEAQSRQEAERLREKLLVAENRLQAAESLCSAQHS |
| | | | | | HVIESSDLSEETIRMKETVEGLQDKLNKRDKEVTALTSQMDMLRAQVSALENKCKSGEK |
| | | | | | KIDSLLKEKRRLEAELEAVSRKTHDASGQLVHISQELLRKERSLNELRVLLLEANRHSP |
| | | | | | GPERDLSREVHKAEWRIKEQKLKDDIRGLREKLTGLDKEKSLSEQRRYSLIDPASPPEL |
| | | | | | LKLQHQLVSTED |
| mACTN3 | 61 | 900 | 355 | 508 | SEQ ID NO: 121 |
| (NM_013456.1) | | | | | QTKLRLSHRPAFMPSEGKLVSDIANAWRGLEQVEKGYEDWLLSEIRRLQRLQHLAEKFQ |
| | | | | | QKASLHEAWTRGKEEMLNQHDYESASLQEVRALLRRHEAFESDLAAHQDRVEHVAALAQ |
| | | | | | ELNELDYHEAASVNSRCQAICDQWDNLGTLTHKRRD |
| mDTNBP1 | 62 | 352 | 1 | 242 | SEQ ID NO: 122 |
| (NM_025772.2) | | | | | MLETLRERLLSVQQDFTSGLKTLSDKSREAKVKGKPRTAPRLPKYSAGLELLSRYEDAW |
| | | | | | AALHRRAKECADAGELVDSEVVMLSAHWEKKRTSLNELQGQLQQLPALLQDLESLMASL |
| | | | | | AHLETSFEEVENHLLHLEDLCGQCELERHKQAQAQHLESYKKSKRKELEAFKAELDTEH |
| | | | | | TQKALEMEHSQQLKLKERQKFFEEAFQQDMEQYLSTGYLQIAERREPMGSMSSMEVNVD |
| | | | | | VLKQLD |
| mTAKEDA013 | 63 | 197 | 1 | 197 | SEQ ID NO: 123 |
| (NA) | | | | | EKGIKLLQAQKLVQYLRECEDVMDWINDKEAIVTSEELGQDLEHVEVLQKKFEEFQTDL |
| | | | | | AAHEERVNEVSQFAAKLIQEQHPEEELIKTKQDEVNAAWQRLKGLALQRQGKLFGAAEV |
| | | | | | QRFNRDVDETIGWIKEKEQLMASDDFGRDLASVQALLRKHEGLERDLAALEDKVKALCA |
| | | | | | EADRLQQSHPLSASQIQGKR |
| m14-3-3g | 64 | 247 | 73 | 247 | SEQ ID NO: 124 |
| (NM_018871.1) | | | | | DGNEKKIEMVRAYREKIEKELEAVCQDVLSLLDNYLIKNCSETQYESKVFYLKMKGDYY |
| | | | | | RYLAEVATGEKRATVVESSEKAYSEAHEISKEHMQPTHPIRLGLALNYSVFYYEIQNAP |
| | | | | | EQACHLAKTAFDDAIAELDTLNEDSYKDSTLIMQLLRDNLTLWTSDQQDDDGGEGNN |
| m14-3-3zeta | 65 | 245 | 56 | 245 | SEQ ID NO: 125 |
| (NM_011740.1) | | | | | RSSWRVVSSIEQKTEGAEKKQQMAREYREKIETELRDICNDVLSLLEKFLIPNASQPES |
| | | | | | KVFYLKMKGDYYRYLAEVAAGDDKKGIVDQSQQAYQEAFEISKKEMQPTHPIRLGLALN |
| | | | | | FSVFYYEILNSPEKACSLAKTALDEAIAELDTLSEESYEDSTLIMQLLRDNLTLWTSDT |
| | | | | | QGDEAEAGEGGEN |
| 14-3-3zeta | 66 | 245 | 19 | 245 | SEQ ID NO: 126 |
| (NM_003406.1) | | | | | YDDMAACMKSVTEQGAELSNEERNLLSVAYKNVVGARRSSWRVVSSIEQKTEGAEKKQQ |
| | | | | | MAREYREKIETELRDICNDVLSLLEKFLIPNASQAESKVFYLKMKGDYYRYLAEVAAGD |
| | | | | | DKKGIVDQSQQAYQEAFEISKKEMQPTHPIRLGLALNFSVFYYEILNSPEKACSLAKTA |
| | | | | | FDEAIAELDTLSEESYKDSTLIMQLLRDNLTLWTSDTQGDEAEAGEGGEN |
| | | | 20 | 210 | SEQ ID NO: 127 |
| | | | | | DDMAACMKSVTEQGAELSNEERNLLSVAYKNVVGARRSSWRVVSSIEQKTEGAEKKQQM |
| | | | | | AREYREKIETELRDICNDVLSLLEKFLIPNASQAESKVFYLKMKGDYYRYLAEVAAGDD |
| | | | | | KKGIVDQSQQAYQEAFEISKKEMQPTHPIRLGLALNFSVFYYEILNSPEKACSLAKTAF |
| | | | | | DEAIAELDTLSEES |
| m14-3-3b | 67 | 246 | 59 | 230 | SEQ ID NO: 128 |
| (AK011389.1) | | | | | SSWRVISSIEQKTERNEKKQQMGKEYREKIEAELQDICNDVLELLDKYLILNATQAESK |
| | | | | | VFYLKMKGDYFRYLSEVASGENKQTTVSNSQQAYQEAFEISKKEMQPTHPIRLGLALNF |
| | | | | | SVFYYEILNSPEKACSLAKTAFDEAIAELDTLNEESYKDSTLIMQLLRDNLTLW |
| m14-3-3theta | 68 | 245 | 82 | 245 | SEQ ID NO: 129 |
| (NM_011739.1) | | | | | YREKVESELRSICYfVLELLDKYLIANATNPESKVFYLKMKGDYFRYLAEVACGDDRKQ |
| | | | | | TIENSQGAYQEAFDISKKEMQPTHPIRLGLALNFSVFYYEILNNPELACTLAKTAFDEA |
| | | | | | IAELDTLNEDSYKDSTLIMQLLRDNLTLWTSDSAGEECDAAEGAEN |
| m14-3-3theta | 69 | 245 | 81 | 245 | SEQ ID NO: 130 |
| (NM 006826.1) | | | | | DYREKVESELRSICTTVLELLDKYLIANATNPESKVFYLKMKGDYFRYLAEVACGDDRK |
| | | | | | QTIDNSQGAYQEAFDISKKEMQPTHPIRLGLALNFSVFYYEILNNPELACTLAKTAFDE |
| | | | | | AIAELDTLNEDSYKDSTLIMQLLRDNLTLWTSDSAGEEGDAAEGAEN |
| mSPNB2 | 70 | 2154 | 825 | 1032 | SEQ ID NO: 131 |
| (NM_009260.1) | | | | | TRLRKQALQDTLALYKMFSEADACELWIDEKEQWLNNMQIPEKLEDLEVVQHRFESLEP |
| | | | | | EMNNQASRVAVVNQIARQLMHNGHPSEREIRAQQDKLNTRWSQFRELVDRKKDALLSAL |
| | | | | | SIQSYHLECNETKSWIREKTKVIESTQDLGNDLAGVMALQRKLTGMERDLVAIEAKLSD |
| | | | | | LQKEAEKLESEHPDQAQAILSRLAEISDVWE |
| BC020494(124) | 71 | 124 | 1 | 124 | SEQ ID NO: 132 |
| (NA) | | | | | DDAAVETAEEAKEPAEADITELCRDMFSKMATYLTGELTATSEDYKLLENMNKLTSLKY |
| | | | | | LEMKDIAINISRNLKDLNQKYAGLQPYLDQINVIEEQVAALEQAAYKLDAYSKKLEAKY |
| | | | | | KKLEKR |
| MACF1 | 72 | 5430 | 3984 | 4240 | SEQ ID NO: 133 |
| (NM_012090.2) | | | | | EKLQPSFEALKRRGEELIGRSQGADKDLAAKEIQDKLDQMVFFWEDIKARAEEREIKFL |
| | | | | | DVLELAEKFWYDMAALLTTIKDTQDIVHDLESPGIDPSIIKQQVEAAETIKEETDGLHE |
| | | | | | ELEFIRILGADLIFACGETEKPEVRKSIDEMNNAWENLNKTWKERLEKLEDAMQAAVQY |
| | | | | | QDTLQAMFDWLDNTVIKLCTMPPVGTDLNTVKDQLNEMKEFKVEVYQQQIEMEKLNHQG |
| | | | | | ELMLKKATDETDRDIIREPLT |
| MYH1 | 73 | 1939 | 1560 | 1700 | SEQ ID NO: 134 |
| (NM_005963.2) | | | | | GKILRIQLELNQVKSEVDRKIAEKDEEIDQMKRNHIRIVESMQSTLDAEIRSRNDAIRL |
| | | | | | KKKMEGDLNEMEIQLNHANRMAAEALRNYRNTQAILKDTQLHLDDALRSQEDLKEQLAM |
| | | | | | VERGANLLQAEIEELRATLEQTE |
| mPPGB | 74 | 474 | 32 | 207 | SEQ ID NO: 135 |
| (NM_008906.1) | | | | | CLPGLAKQPSFRQYSGYLRASDSKHFHYWFVESQNDPKNSPVVLWLNGGPGCSSLDGLL |
| | | | | | TEHGPFLIQPDGVTLEYDPYAWNLIANVLYIESPAGVGFSYSDDKMYLTNDTEVAENNY |
| | | | | | EALKDFFRLFPEYKDNKLFLTGESYAGIYIPTLAvLvMQDPSMNLQGLAVGNGLASYE |
| mZYX | 75 | 564 | 230 | 506 | SEQ ID NO: 136 |
| (NM_011777.1) | | | | | HVQPQPVSSANTQPRGPLSQAPTPAPKFAPVAPKFTPVVSKFSPGAPSGPGPQPNQKMV |
| | | | | | PPDAPSSVSTGSPQPPSFTYAQQKEKPLVQEKQHPQPPPAQNQNQVRSPGGPGPLTLKE |
| | | | | | VEELEQLTQQLMQDMEHPQRQSVAVNESCGKCNQPLARAQPAVRALGQLFHITCFTCHQ |
| | | | | | CQQQLQGQQFYSLEGAPYCEGCYTDTLEKCNTCGQPITDRMLRATGKAYHPQCFTCVVC |
| | | | | | ACPLEGTSFIVDQANQPHCVPDYHKQYAPRCSVCSEPIMPE |
| mPRKCABP | 76 | 416 | 1 | 382 | SEQ ID NO: 137 |
| (XM_122945.1) | | | | | MFADLDYDIEEDKLGIPTVPGKVTLQKDAQNLIGISIGGGAQYGPCLYIVQVFDNTPAA |
| | | | | | LDGTVAAGDEITGVNGKSIKGKTKVEVAKMIQEVKGEVTIHYNKLQADPKQGMSLDIVL |
| | | | | | KKVKHRLVENMSSGTADALGLSRAILCNDGLVKRLEELERTAELYKGMTEHTKNLLRAF |
| | | | | | YELSQTNRAFGDVFSVIGVREPQPAASEAFVKFADAHRSIEKLGIRLLKTIKPMLTDLN |
| | | | | | TYLNKAIPDTRLTIKKYLDVKFEYLSYCLKVKEMDDEEYSCIALGEPLYRVSTGNYEYR |
| | | | | | LILRCRQEARARFSQMRKDVLEKMELLDQKHVQDIVFQLQRFVSTMSKYYNDCYAVLRD |
| | | | | | ADVFPIEVDLAHTTLAYGPNQGSFTDGE |
| mMYLK | 77 | 1561 | 568 | 897 | SEQ ID NO: 138 |
| (AF335470.1) | | | | | TYTGLAENAMGQVSCSATVTVQEKKGEGERXHRLSPARSKPIAPIFLQGLSDLKVMDGS |
| | | | | | QVTMTVQVSGNPPPEVIWLHDGNEIQESEDFHFEQKGGWHSLCIQEVFPEDTGTYTCEA |
| | | | | | WNSAGEVRTRAVLTVQEPHDGTQPWFISKPRSVTATLGQSVLISCAIAGDPFSTGHWLR |
| | | | | | DGRALSKDSGHFELLQNEDVFTLVLKNVQPWHAGQYEILLKNRVGECVCQVSLMLHNSP |
| | | | | | SRAPPRGREPASCEGLGGGGGVGAHGDGDRHGTLRPCWPARGQGWPEEEDGEDVRGLLK |
| | | | | | RRVETRLHTEEAIRQQEVGQLDFRDLLGEKVSTKT |

AA: amino acid; NA: not applicable; GB: GenBank

2.1. Cellular Functions of FHOS and The Interacting Proteins, and Disease Involvement
FHOS

[0130] FHOS is a protein which is a member of the Formin/Diaphanous family of proteins. The FHOS gene is ubiquitously expressed but is found in abundance in the spleen. The encoded protein has sequence homology to Diaphanous and Formin proteins within the Formin Homology (FH)1 and FH2 domains. It also contains a coiled-coil domain, a collagen-like domain, two nuclear localization signals, and several potential PKC and PKA phosphorylation sites. It is a predominantly cytoplasmic protein and is expressed in a variety of human cell lines. FHOS may be involved in signal transduction, cytoskeletal rearrangement, membrane trafficking, cell polarity, cell movement, transcription activation or inhibition, protein synthesis and cell-cycle regulation.

FHOS interacts with mRNF23.

[0131] A bait comprising amino acids 1 to 150 (of 1164 total amino acids) of FHOS selected a single clone from a mouse embryo activation domain library comprising the polypeptide sequence of SEQ ID NO: 4, which corresponds with the highest homology to amino acids 101 to 234 (of 488 total amino acids) of mRNF23. The interacting fragments of the bait and prey should contain the minimal binding domain of each protein. Since the bait fragment of FHOS comprises amino acids 1 to 150, the sequence having a truncation of up to 1014 (which is obtained by subtracting 150 from 1164, the total amino acids number of FHOS) amino acids at the C-terminus of the FHOS sequence set forth in FIG. 1 does not render it unable to interact with mRNF23. Likewise, since the fragment of mRNF23 comprises amino acids 101 to 234, the sequence having a truncation of up to 100 amino acids at the N-terminus and/or up to 254 (which is obtained by subtracting 234 from 488, the total amino acids number of mRNF23) amino acids at the C-terminus of the mRNF23 sequence set forth in FIG. 2 does not render it unable to interact with FHOS.

[0132] mRNF23, also known as mTRIM39, or mTFP, is the mouse ortholog of human RNF23: RING finger protein 23. mRNF23 is known to be abundant in testis. Structural analysis of mRNF23 reveals the presence of RING-type zinc finger domain (amino acids 29 to 70), B box-type zinc finger domain (amino acids 102 to 143), coiled coil domain (amino acids 181 to 250) and SPRY domain (amino acids 360 to 485). RING finger proteins are known to play crucial roles in differentiation, development, oncogenesis, and apoptosis. Although RING finger domains are involved in protein-protein interactions and typically bind zinc, they are distinct from zinc finger domains in terms of sequence and structure.

FHOS interacts with mERp59.

[0133] A bait comprising amino acids 1 to 150 (of 1164 total amino acids) of FHOS selected a single clone from a mouse embryo activation domain library comprising the polypeptide sequence of SEQ ID NO: 5, which corresponds with the highest homology to amino acids 23 to 325 (of 509 total amino acids) of mERp5. The interacting fragments of the bait and prey should contain the minimal binding domain of each protein. Since the bait fragment of FHOS comprises amino acids 1 to 150, the sequence having a truncation of up to 1014 (which is obtained by subtracting 150 from 1164, the total amino acids number of FHOS) amino acids at the C-terminus of the FHOS sequence set forth in FIG. 1 does not render it unable to interact with mERp59. Likewise, since the fragment of mERp59 comprises amino acids 23 to 325, the sequence having a truncation of up to 22 amino acids at the N-terminus and/or up to 184 (which is obtained by subtracting 325 from 509, the total amino acids number of mERp59) amino acids at the C-terminus of the mERp59 sequence set forth in FIG. 3 does not render it unable to interact with FHOS.

[0134] mERp59, also known as mP4hb, mPDI or mThbp, is the mouse ortholog of P4HB: procollagen-proline, 2-oxoglutarate 4-dioxygenase (proline 4-hydroxylase), beta polypeptide (protein disulfide isomerase; thyroid hormone binding protein p55). P4HB has protein disulfide isomerase activity, catalyzes formation of 4-hydroxyproline in collagens. A cDNA for a mouse P4HB (mERp59) was isolated using a human cDNA clone having homology to the human beta chain of the prolyl 4-hydroxylase enzyme (J:9055, Gong Q H; Fukuda T; Parkison C; Cheng S Y, Nucleic Acids Res 1988;16(3):1203).

FHOS interacts with mBRD7(621).

[0135] A bait comprising amino acids 1 to 150 (of 1164 total amino acids) of FHOS selected a single clone from a mouse embryo activation domain library comprising the novel polypeptide sequence of SEQ ID NO: 6, which corresponds with the highest homology to amino acids 43 to 311 (of 621 total amino acids) of mBRD7(621). The interacting fragments of the bait and prey should contain the minimal binding domain of each protein. Since the bait fragment of FHOS comprises amino acids 1 to 150, the sequence having a truncation of up to 1014 (which is obtained by subtracting 150 from 1164, the total amino acids number of FHOS) amino acids at the C-terminus of the FHOS sequence set forth in FIG. 1 does not render it unable to interact with mBRD7(621). Likewise, since the fragment of mBRD7(621) comprises amino acids 43 to 311, the sequence having a truncation of up to 42 amino acids at the N-terminus and/or up to 310 (which is obtained by subtracting 311 from 621, the total amino acids number of mBRD7(621)) amino acids at the C-terminus of the mBRD7(621) sequence set forth in FIG. 4 does not render it unable to interact with FHOS.

[0136] The polypeptide sequence of mBRD7(621) set forth in FIG. 4 is identical to that of mBRD7, GenBank accession number NM_{—}012047, except that 30 amino acids from 149 to 178 of mBRD7 are deleted for mBRD7(621).

[0137] mBRD7, also known as bromodomain protein 75 kDa, BP75 or CELT1X1, is the mouse ortholog of human BRD7. Initially mBRD7 was identified in a two-hybrid screening for proteins that interact with the first PDZ (acronym for post-synaptic density protein PSD-95, Drosophila discs large tumor suppressor DIgA and the tight junction protein ZO-1) domain in protein tyrosine phosphatase-BAS-like (PTP-BL) (Cuppen E et al., FEBS Lett. 1999 459(3):291-8). BRD7 is also identified as an EIB-AP5 interacting protein by the two-hybrid screening and confirmed to form EIB-AP5/BRD7 complex in vivo and in vitro. BRD7 also binds to histone H2A, H2B, H3 and H4 through its bromodomain. The bromodomain is not necessary for the interaction with EIB-AP5. Indeed, the triple complex formation of EIB-AP5, BRD7 and histones was demonstrated. The complex formation between BRD7 and EIB-AP5 may link chromatin events with mRNA-processing on the level of transcription regulation (Kzhyshkowska et al., Biochem. J. 2002 Dec. 18; PubMEd ID 12489984)).

FHOS interacts with mSPNA1.

[0138] A bait comprising amino acids 1 to 150 (of 1164 total amino acids) of FHOS selected a single clone from a mouse embryo activation domain library comprising the polypeptide sequence of SEQ ID NO: 7, which corresponds with the highest homology to amino acids 454 to 677 (of 2415 total amino acids) of mSPNA1. The interacting fragments of the bait and prey should contain the minimal binding domain of each protein. Since the bait fragment of FHOS comprises amino acids 1 to 150, the sequence having a truncation of up to 1014 (which is obtained by subtracting 150 from 1164, the total amino acids number of FHOS) amino acids at the C-terminus of the FHOS sequence set forth in FIG. 1 does not render it unable to interact with mSPNA1. Likewise, since the fragment of mSPNA1 comprises amino acids 454 to 677, the sequence having a truncation of up to 453 amino acids at the N-terminus and/or up to 1738 (which is obtained by subtracting 677 from 2415, the total amino acids number of mSPNA1) amino acids at the C-terminus of the mSPNA1 sequence set forth in FIG. 5 does not render it unable to interact with FHOS.

[0139] mSPNA1, also known as erythroid alpha-spectrin 1, is the mouse ortholog of human Spna1, a member of a family of actin-crosslinking proteins. mSPNA1 contains 22 spectrin repeats between amino acids 18 and 2254. mSPNA1 also contains 2 EF-hand calcium-binding domains (amino acids 2280 to 2291 and 2323 to 2334) and SH3 domain (amino acids 975 to 1034). Spectrin is the major constituent of the cytoskeletal network underlying the erythrocyte plasma membrane. It associates with band 4.1 and actin to form the cytoskeletal superstructure of the erythrocyte plasma membrane.

FHOS interacts with mVCP.

[0140] A bait comprising amino acids 1 to 150 (of 1164 total amino acids) of FHOS selected a single clone from a mouse embryo activation domain library comprising the polypeptide sequence of SEQ ID NO: 8, which corresponds with the highest homology to amino acids 478 to 797 (of 806 total amino acids) of mVCP. The interacting fragments of the bait and prey should contain the minimal binding domain of each protein. Since the bait fragment of FHOS comprises amino acids 1 to 150, the sequence having a truncation of up to 1014 (which is obtained by subtracting 150 from 1164, the total amino acids number of FHOS) amino acids at the C-terminus of the FHOS sequence set forth in FIG. 1 does not render it unable to interact with mVCP. Likewise, since the fragment of mVCP comprises amino acids 478 to 797, the sequence having a truncation of up to 477 amino acids at the N-terminus and/or up to 9 (which is obtained by subtracting 797 from 806, the total amino acids number of mVCP) amino acids at the C-terminus of the mVCP sequence set forth in FIG. 6 does not render it unable to interact with FHOS. mVCP, also known as valosin containing protein, transitional endoplasmic reticulum ATPase (mTERA) or TER ATPase, is the mouse ortholog of Vcp, a member of the AAA family of ATPases. mVCP contains a valosin domain (amino acids 493 to 517) and ATPase domains (amino acids 245 to 252 and 518 to 525). mVCP forms homohexamer, a ring-shaped particle of 12.5 nm diameter, that displays 6-fold radial symmetry. mVCP is involved in the transfer of membranes from the endoplasmic reticulum to the Golgi apparatus occurring via 50-70 nm transition vesicles which derive from part-rough, part-smooth transitional elements of the endoplasmic reticulum (TER).

FHOS interacts with mSTAT5A.

[0141] A bait comprising amino acids 1 to 150 (of 1164 total amino acids) of FHOS selected a single clone from a mouse embryo activation domain library comprising the polypeptide sequence of SEQ ID NO: 9, which corresponds with the highest homology to amino acids 32 to 319 (of 793 total amino acids) of mSTAT5A. The interacting fragments of the bait and prey should contain the minimal binding domain of each protein. Since the bait fragment of FHOS comprises amino acids 1 to 150, the sequence having a truncation of up to 1014 (which is obtained by subtracting 150 from 1164, the total amino acids number of FHOS) amino acids at the C-terminus of the FHOS sequence set forth in FIG. 1 does not render it unable to interact with mSTAT5A. Likewise, since the fragment of mSTAT5A comprises amino acids 32 to 319, the sequence having a truncation of up to 31 amino acids at the N-terminus and/or up to 474 (which is obtained by subtracting 319 from 793, the total amino acids number of mSTAT5A) amino acids at the C-terminus of the mSTAT5A sequence set forth in FIG. 7 does not render it unable to interact with FHOS.

[0142] mSTAT5A, also known as signal transducer and activator of transcription 5A, belongs to the stat family of transcription factors and forms a homodimer or a heterodimer with a related family member. mSTAT5A contains one SH2 domain (amino acids 589 to 686) and is tyrosine phosphorylated in response to IL-2, IL-3, IL-7, IL-15, GM-CSF, growth hormone, prolactine, erythropoietin and thrombopoietin. mSTAT5A translocates into nucleus in response to phosphorylation. The tyrosine phosphorylation is required for DNA-binding activity and dimerization of mSTAT5A. Serine phosphorylation is also required for maximal transcriptional activity.

FHOS interacts with mTAKEDA009.

[0143] A bait comprising amino acids 1 to 150 (of 1164 total amino acids) of FHOS selected a single clone from a mouse embryo activation domain library comprising the novel polypeptide sequence of SEQ ID NO: 10, which corresponds to amino acids 1 to 116 (of 116 total amino acids) of mTAKEDA009. The interacting fragments of the bait and prey should contain the minimal binding domain of each protein. Since the bait fragment of FHOS comprises amino acids 1 to 150, the sequence having a truncation of up to 1014 (which is obtained by subtracting 150 from 1164, the total amino acids number of FHOS) amino acids at the C-terminus of the FHOS sequence set forth in FIG. 1 does not render it unable to interact with m TAKEDA009.

[0144] mTAKEDA009 is the partial amino acid sequence of the mouse ortholog of human MYH8, member 8 of the myosin heavy chain family of motor proteins. MYH8 may provide force for muscle contraction, cytokinesis and phagocytosis. As well as other family members, MYH8 contains an ATPase head domain and rod-like tail domain. The mTAKEDA009 prey fragment (amino acids 1-116) comprises the myosin tail domain (Pfam).

FHOS interacts with mPTRF.

[0145] A bait comprising amino acids 1 to 150 (of 1164 total amino acids) of FHOS selected a single clone from a mouse embryo activation domain library comprising the polypeptide sequence of SEQ ID NO: 11, which corresponds with the highest homology to amino acids 25 to 130 (of 392 total amino acids) of mPTRF. The interacting fragments of the bait and prey should contain the minimal binding domain of each protein. Since the bait fragment of FHOS comprises amino acids 1 to 150, the sequence having a truncation of up to 1014 (which is obtained by subtracting 150 from 1164, the total amino acids number of FHOS) amino acids at the C-terminus of the FHOS sequence set forth in FIG. 1 does not render it unable to interact with mPTRF. Likewise, since the fragment of mPTRF comprises amino acids 25 to 130, the sequence having a truncation of up to 24 amino acids at the N-terminus and/or up to 262 (which is obtained by subtracting 130 from 392, the total amino acids number of mPTRF) amino acids at the C-terminus of the mPTRF sequence set forth in FIG. 9 does not render it unable to interact with FHOS.

[0146] mPTRF, also known as polymerase I and transcript release factor, is the mouse ortholog of human Ptrf. Termination of RNA polymerase 1 transcription is a 2-step process that involves pausing of transcription elongation complexes and release of both the pre-rRNA and Pol I from the template. In mouse, pausing is mediated by Ttf1. An additional trans-acting factor is required for dissociation of the paused complex (Mason et al., 1997 EMBO J 16: 163-172). The factor was designated Ptrf for ‘Pol I and transcript release factor’. Using a yeast two-hybrid screen with mouse Ttf1 as a bait, a partial human cDNA encoding Ptrf was isolated. Further, a full-length mouse Ptrf cDNA using a PCR-based approach was obtained. The predicted mouse and truncated human PTRF proteins are 94% identical. Ptrf interacts with both TTF1 and Pol I, and binds to transcripts containing the 3-prime end of pre-rRNA in vitro. Recombinant Ptrf induced the dissociation of ternary Pol I transcription complexes in vitro, releasing both Pol I and nascent transcripts from the template (Jansa et al., 1998 EMBO J. 17: 2855-2864).

FHOS interacts with mAK031693.

[0147] A bait comprising amino acids 1 to 150 (of 1164 total amino acids) of FHOS selected a single clone from a mouse embryo activation domain library comprising the polypeptide sequence of SEQ ID NO: 12, which corresponds with the highest homology to amino acids 72 to 360 (of 439 total amino acids) of mAK031693. The interacting fragments of the bait and prey should contain the minimal binding domain of each protein. Since the bait fragment of FHOS comprises amino acids 1 to 150, the sequence having a truncation of up to 1014 (which is obtained by subtracting 150 from 1164, the total amino acids number of FHOS) amino acids at the C-terminus of the FHOS sequence set forth in FIG. 1 does not render it unable to interact with mAK031693. Likewise, since the fragment of mAK031693 comprises amino acids 72 to 360, the sequence having a truncation of up to 71 amino acids at the N-terminus and/or up to 79 (which is obtained by subtracting 360 from 439, the total amino acids number of mAK031693) amino acids at the C-terminus of the mAK031693 sequence set forth in FIG. 10 does not render it unable to interact with FHOS.

[0148] mAK031693 was originally identified as a mus musculus 13 days embryo male testis cDNA, RIKEN full-length enriched library, clone:6030491119 by the FANTOM consortium and the RIKEN genome exploration research group. mAK031693 is the mouse ortholog of human AT2 receptor-interacting protein 1 (ATIP1). ATIP1 was also identified as MP44, FLJ14295, KIAA1288 and DKFZp586D1519. According to publicly available EST data, the mRNA encoding ATIP1 is expressed in various tissues including heart, prostate, kidney, lung, skeletal muscle, brain and pancreas.

FHOS interacts with m1200014P03Rik.

[0149] A bait comprising amino acids 1 to 150 (of 1164 total amino acids) of FHOS selected a single clone from a mouse embryo activation domain library comprising the polypeptide sequence of SEQ ID NO: 13, which corresponds with the highest homology to amino acids 253 to 546 (of 619 total amino acids) of m1200014P03Rik. The interacting fragments of the bait and prey should contain the minimal binding domain of each protein. Since the bait fragment of FHOS comprises amino acids 1 to 150, the sequence having a truncation of up to 1014 (which is obtained by subtracting 150 from 1164, the total amino acids number of FHOS) amino acids at the C-terminus of the FHOS sequence set forth in FIG. 1 does not render it unable to interact with m1200014P03Rik. Likewise, since the fragment of m1200014P03Rik comprises amino acids 253 to 546, the sequence having a truncation of up to 252 amino acids at the N-terminus and/or up to 73 (which is obtained by subtracting 546 from 619, the total amino acids number of m1200014P03Rik) amino acids at the C-terminus of the m1200014P03Rik sequence set forth in FIG. 11 does not render it unable to interact with FHOS.

[0150] m1200014P03Rik is RIKEN cDNA 1200014P03 gene with unknown function and the mouse ortholog of human LOC89953, hypothetical protein BC012357. Structural analysis of m1200014P03Rik predicts the presence of a coiled coil domain (amino acids 90-155) and four tetratricopeptide repeats (TPR) (amino acids 253-286, 295-328, 337-370 and 379-412). No transmembrane domain was detected. Based on publicly available EST data, the mRNA encoding m1200014P03Rik shows broad range of expression in various tissues.

FHOS interacts with mNNP1.

[0151] A bait comprising amino acids 1 to 150 (of 1164 total amino acids) of FHOS selected a single clone from a mouse embryo activation domain library comprising the polypeptide sequence of SEQ ID NO: 14, which corresponds with the highest homology to amino acids 41 to 391 (of 494 total amino acids) of mNNP1. The interacting fragments of the bait and prey should contain the minimal binding domain of each protein. Since the bait fragment of FHOS comprises amino acids 1 to 150, the sequence having a truncation of up to 1014 (which is obtained by subtracting 150 from 1164, the total amino acids number of FHOS) amino acids at the C-terminus of the FHOS sequence set forth in FIG. 1 does not render it unable to interact with mNNP1. Likewise, since the fragment of mNNP1 comprises amino acids 41 to 391, the sequence having a truncation of up to 40 amino acids at the N-terminus and/or up to 103 (which is obtained by subtracting 391 from 494, the total amino acids number of mNNP1) amino acids at the C-terminus of the mNNP1 sequence set forth in FIG. 12 does not render it unable to interact with FHOS.

[0152] mNNP1, also known as novel nuclear protein 1 or Nop52, belongs to the NNP-1 family and plays a critical role in the generation of 28S rRNA. Structural analysis of mMMP1 predicts two nuclear localization signals (amino acids 355-372 and 402-419). Based on publicly available EST data, the mRNA encoding mNNP1 is broadly expressed in various tissues including brain, testis, liver, stomach and embryo.

FHOS interacts with mLOC213473(195).

[0153] A bait comprising amino acids 1 to 150 (of 1164 total amino acids) of FHOS selected a single clone from a mouse embryo activation domain library comprising the polypeptide sequence of SEQ ID NO: 15, which corresponds with the highest homology to amino acids 1 to 195 (of 195 total amino acids) of mLOC213473(195). The interacting fragments of the bait and prey should contain the minimal binding domain of each protein. Since the bait fragment of FHOS comprises amino acids 1 to 150, the sequence having a truncation of up to 1014 (which is obtained by subtracting 150 from 1164, the total amino acids number of FHOS) amino acids at the C-terminus of the FHOS sequence set forth in FIG. 1 does not render it unable to interact with mLOC213473(195).

[0154] The cDNA encoding mLOC213473(195) set forth in FIG. 13 includes predicted 5′UTR of mLOC213473 (GenBank accession number XM_{—}135033), and thus encodes 100 amino acids at the N-terminus not predicted to be present in the native protein.

[0155] mLOC213473 is a hypothetical protein with unknown function and the mouse ortholog of human hypothetical protein KIAA1009. Structural analysis of mLOC21347 predicts coiled coil domain (amino acid 4-78; 104-178 in mLOC21347(195)).

FHOS interacts with mGOLGA3.

[0156] A bait comprising amino acids 1 to 150 (of 1164 total amino acids) of FHOS selected a single clone from a mouse embryo activation domain library comprising the polypeptide sequence of SEQ ID NO: 16, which corresponds with the highest homology to amino acids 820 to 1019 (of 1447 total amino acids) of mGOLGA3. The interacting fragments of the bait and prey should contain the minimal binding domain of each protein. Since the bait fragment of FHOS comprises amino acids 1 to 150, the sequence having a truncation of up to 1014 (which is obtained by subtracting 150 from 1164, the total amino acids number of FHOS) amino acids at the C-terminus of the FHOS sequence set forth in FIG. 1 does not render it unable to interact with mGOLGA3. Likewise, since the fragment of mGOLGA3 comprises amino acids 820 to 1019, the sequence having a truncation of up to 819 amino acids at the N-terminus and/or up to 428 (which is obtained by subtracting 1019 from 1447, the total amino acids number of mGOLGA3) amino acids at the C-terminus of the mGOLGA3 sequence set forth in FIG. 14 does not render it unable to interact with FHOS.

[0157] mGOLGA3 (golgi autoantigen, golgin subfamily a, 3), also known as Mea2, is the mouse ortholog of human Golga3. mGOLGA3 is highly expressed in testis. The transcripts can be found in spermatids during spermatogenesis. No expression is observed in leydig cells, spermatogonia, or spermatocytes. mGOLGA3 may play an important role in spermatogenesis and/or testis development.

FHOS interacts with mMYG1-pending.

[0158] A bait comprising amino acids 1 to 150 (of 1164 total amino acids) of FHOS selected a single clone from a mouse embryo activation domain library comprising the polypeptide sequence of SEQ ID NO: 17, which corresponds with the highest homology to amino acids 49 to 368 (of 380 total amino acids) of mMYG1-pending. The interacting fragments of the bait and prey should contain the minimal binding domain of each protein. Since the bait fragment of FHOS comprises amino acids 1 to 150, the sequence having a truncation of up to 1014 (which is obtained by subtracting 150 from 1164, the total amino acids number of FHOS) amino acids at the C-terminus of the FHOS sequence set forth in FIG. 1 does not render it unable to interact with mMYG1-pending. Likewise, since the fragment of mMYG1-pending comprises amino acids 49 to 368, the sequence having a truncation of up to 48 amino acids at the N-terminus and/or up to 12 (which is obtained by subtracting 368 from 380, the total amino acids number of mMYG1-pending) amino acids at the C-terminus of the mMYG1-pending sequence set forth in FIG. 15 does not render it unable to interact with FHOS.

[0159] mMYG1-pending, also known as melanocyte proliferating gene 1 or Gamm1, belongs to the Myg1 family. Based on publicly available EST data, the mRNA encoding mMYG1-pending is expressed in various tissues including thymus, embryo, liver, brain, pancreas and ovary.

FHOS interacts with mAK044679(668).

[0160] A bait comprising amino acids 1 to 150 (of 1164 total amino acids) of FHOS selected a single clone from a mouse embryo activation domain library comprising the polypeptide sequence of SEQ ID NO: 18, which corresponds with the highest homology to amino acids 1 to 243 (of 668 total amino acids) of mAK044679(668). The interacting fragments of the bait and prey should contain the minimal binding domain of each protein. Since the bait fragment of FHOS comprises amino acids 1 to 150, the sequence having a truncation of up to 1014 (which is obtained by subtracting 150 from 1164, the total amino acids number of FHOS) amino acids at the C-terminus of the FHOS sequence set forth in FIG. 1 does not render it unable to interact with mAK044679(668). Likewise, since the fragment of mAK044679(668) comprises amino acids 1 to 243, the sequence having a truncation of up to 425 (which is obtained by subtracting 243 from 668, the total amino acids number of mAK044679(668)) amino acids at the C-terminus of the mAK044679(668) sequence set forth in FIG. 16 does not render it unable to interact with FHOS.

[0161] The cDNA encoding mAK044679(668) set forth in FIG. 16 includes predicted 5′UTR of mAK044679 (GenBank accession number AK044679), and thus encodes 41 amino acids at the N-terminus not predicted to be present in the native protein.

[0162] mAK044679 is a mus musculus adult retina cDNA, RIKEN full-length enriched library, clone: A930032A19, originally isolated by the FANTOM consortium and the RIKEN genome exploration research group. mAK044679, also identified as hypothetical protein MGC11932, is the mouse ortholog of human OVARC1000148 PROTEIN. Structural analysis of mAK044679 predicts RRM (RNA recognition motif) (amino acid 448-515). Based on publicly available EST data, the mRNA encoding mAK044679 is expressed in various tissues including testis, skin, heart, liver and spleen.

FHOS interacts with RS21C6.

[0163] A bait comprising amino acids 1 to 150 (of 1164 total amino acids) of FHOS selected 2 identical clones from an adipose activation domain library comprising the polypeptide sequence of SEQ ID NO: 19, which corresponds with the highest homology to amino acids 69 to 170 (of 170 total amino acids) of RS21C6. The interacting fragments of the bait and prey should contain the minimal binding domain of each protein. Since the bait fragment of FHOS comprises amino acids 1 to 150, the sequence having a truncation of up to 1014 (which is obtained by subtracting 150 from 1164, the total amino acids number of FHOS) amino acids at the C-terminus of the FHOS sequence set forth in FIG. 1 does not render it unable to interact with RS21C6. Likewise, since the fragment of RS21C6 comprises amino acids 69 to 170, the sequence having a truncation of up to 68 amino acids at the N-terminus of the RS21C6 sequence set forth in FIG. 17 does not render it unable to interact with FHOS.

[0164] RS21C6, also identified as a hypothetical protein MGC5627, is similar to mouse RS21C6 (identified with monoclonal antibody RS21C6) that may be involved in T cell development. Based on publicly available EST data, the mRNA encoding RS21C6 is expressed in a broad range of tissues. Structural analysis of RS21C6 reveals no known features.

FHOS interacts with KIAA0562.

[0165] A bait comprising amino acids 1 to 150 (of 1164 total amino acids) of FHOS selected a single clone from a skeletal muscle activation domain library comprising the polypeptide sequence of SEQ ID NO: 20, which corresponds with the highest homology to amino acids 264 to 635 (of 925 total amino acids) of KIAA0562. The interacting fragments of the bait and prey should contain the minimal binding domain of each protein. Since the bait fragment of FHOS comprises amino acids 1 to 150, the sequence having a truncation of up to 1014 (which is obtained by subtracting 150 from 1164, the total amino acids number of FHOS) amino acids at the C-terminus of the FHOS sequence set forth in FIG. 1 does not render it unable to interact with KIAA0562. Likewise, since the fragment of KIAA0562 comprises amino acids 264 to 635, the sequence having a truncation of up to 263 amino acids at the N-terminus and/or up to 290 (which is obtained by subtracting 635 from 925, the total amino acids number of KIAA0562) amino acids at the C-terminus of the KIAA0562 sequence set forth in FIG. 18 does not render it unable to interact with FHOS.

[0166] The original cDNA encoding a fragment of KIAA0562 was isolated from a brain cDNA library and sequenced at the Kazusa DNA Research Institute in Japan (Nagase et al., DNA Res 1998; 5(6):355-64). So far, no function is known for KIAA0562. Based on publicly available EST and RT-PCR data, the mRNA encoding KIAA0562 is expressed in a broad range of tissues with relatively high expression in kidney, skeletal muscle and brain. Structural analysis of KIAA1043 reveals the presence of Myb binding domain (amino acids 454 to 462).

FHOS interacts with COPB.

[0167] A bait comprising amino acids 1 to 150 (of 1164 total amino acids) of FHOS selected 4 identical clones from a skeletal muscle activation domain library comprising the polypeptide sequence of SEQ ID NO: 21, which corresponds with the highest homology to amino acids 306 to 868 (of 953 total amino acids) of COPB. The interacting fragments of the bait and prey should contain the minimal binding domain of each protein. Since the bait fragment of FHOS comprises amino acids 1 to 150, the sequence having a truncation of up to 1014 (which is obtained by subtracting 150 from 1164, the total amino acids number of FHOS) amino acids at the C-terminus of the FHOS sequence set forth in FIG. 1 does not render it unable to interact with COPB. Likewise, since the fragment of COPB comprises amino acids 306 to 868, the sequence having a truncation of up to 305 amino acids at the N-terminus and/or up to 85 (which is obtained by subtracting 868 from 953, the total amino acids number of COPB) amino acids at the C-terminus of the COPB sequence set forth in FIG. 19 does not render it unable to interact with FHOS.

[0168] COPB is a beta subunit of the coatomer, oligomeric complex that consists of at least the alpha, beta, beta', gamma, delta, epsilon and zeta subunits. The coatomer is a cytosolic protein complex that binds to dilysine motifs and reversibly associates with Golgi non-clathrin-coated vesicles, which further mediates biosynthetic protein transport from the endoplasmic reticulum (ER), via the Golgi up to the trans Golgi network. The coatomer complex is required for budding from Golgi membranes, and is essential for the retrograde Golgi-to-ER transport of dilysine-tagged proteins. In mammals, the coatomer can only be recruited by membranes associated two ADP-ribosylation factors (ARFs), which are small GTP-binding proteins. The complex also influences the Golgi structural integrity, as well we the processing, activity, and endocytic recycling of LDL receptors.

FHOS interacts with MYH7.

[0169] A bait comprising amino acids 1 to 150 (of 1164 total amino acids) of FHOS selected a single clone from a skeletal muscle activation domain library comprising the polypeptide sequence of SEQ ID NO: 22, which corresponds with the highest homology to amino acids 1250 to 1619 (of 1935 total amino acids) of MYH7. Another bait comprising amino acids 1 to 348 (of 1164 total amino acids) of FHOS selected 43 identical clones from a skeletal muscle activation domain library comprising the polypeptide sequence of SEQ ID NO: 23, which corresponds with the highest homology to amino acids 820 to 1038 (of 1935 total amino acids) of MYH7. The interacting fragments of the bait and prey should contain the minimal binding domain of each protein. Since the overlapping bait fragment of FHOS spans amino acids 1 to 150, the sequence having a truncation of up to 1014 (which is obtained by subtracting 150 from 1164, the total amino acids number of FHOS) amino acids at the C-terminus of the FHOS sequence set forth in FIG. 1 does not render it unable to interact with MYH7. Likewise, since the fragment of MYH7 comprises amino acids 1250 to 1619 and 820 to 1038, respectively, the sequence having a truncation of up to 1249 amino acids at the N-terminus and/or up to 316 (which is obtained by subtracting 1619 from 1935, the total amino acids number of MYH7) amino acids at the C-terminus of the MYH7 sequence set forth in FIG. 20 or the sequence having a truncation of up to 819 amino acids at the N-terminus and/or up to 897 (which is obtained by subtracting 1038 from 1935, the total amino acids number of MYH7) amino acids at the C-terminus of the MYH7 sequence set forth in FIG. 20 does not render it unable to interact with FHOS.

[0170] MYH7 is the cardiac muscle beta (or slow) isoform of myosin heavy chain, a member of motor protein family that provides force for muscle contraction. Changes in the relative abundance of MYH7 and MYH6 (the alpha, or fast, isoform of cardiac myosin heavy chain) correlate with the contractile velocity of cardiac muscle. Mutations in MYH7 are associated with familial hypertrophic cardiomyopathy.

FHOS interacts with KIAA1633.

[0171] A bait comprising amino acids 1 to 150 (of 1164 total amino acids) of FHOS selected 3 identical clones from a skeletal muscle activation domain library comprising the polypeptide sequence of SEQ ID NO: 24, which corresponds with the highest homology to amino acids 243 to 406 (of 1561 total amino acids) of KIAA1633. The interacting fragments of the bait and prey should contain the minimal binding domain of each protein. Since the bait fragment of FHOS comprises amino acids 1 to 150, the sequence having a truncation of up to 1014 (which is obtained by subtracting 150 from 1164, the total amino acids number of FHOS) amino acids at the C-terminus of the FHOS sequence set forth in FIG. 1 does not render it unable to interact with KIAA1633. Likewise, since the fragment of KIAA1633 comprises amino acids 243 to 406, the sequence having a truncation of up to 242 amino acids at the N-terminus and/or up to 1155 (which is obtained by subtracting 406 from 1561, the total amino acids number of KIAA1633) amino acids at the C-terminus of the KIAA1633 sequence set forth in FIG. 21 does not render it unable to interact with FHOS.

[0172] The original cDNA encoding a fragment of KIAA1633 was isolated from a brain cDNA library and sequenced at the Kazusa DNA Research Institute in Japan (Nagase et al., DNA Res 1998; 5(6):355-64). Based on publicly available EST and RT-PCR data, the mRNA encoding KIAA1633 is expressed in a broad range of tissues with relatively high expression in skeletal muscle, brain and kidney. Structural analysis of KIAA1633 reveals the presence of ATP/GTP-binding site motifA (P-loop) (amino acids 484 to 491) and translation initiation factor SUII domain (amino acids 637 to 644). KIAA1633 is also known to be CDK5RAP2: CDK5 regulatory subunit associated protein 2.

FHOS interacts with KIAA1288(1191).

[0173] A bait comprising amino acids 1 to 150 (of 1164 total amino acids) of FHOS selected two identical clones from a skeletal muscle activation domain library comprising the polypeptide sequence of SEQ ID NO: 25, which corresponds with the highest homology to amino acids 652 to 1078 (of 1191 total amino acids) of KIAA1288(1191). The interacting fragments of the bait and prey should contain the minimal binding domain of each protein. Since the bait fragment of FHOS comprises amino acids 1 to 150, the sequence having a truncation of up to 1014 (which is obtained by subtracting 150 from 1164, the total amino acids number of FHOS) amino acids at the C-terminus of the FHOS sequence set forth in FIG. 1 does not render it unable to interact with KIAA1288(1191). Likewise, since the fragment of KIAA1288(1191) comprises amino acids 652 to 1078, the sequence having a truncation of up to 651 amino acids at the N-terminus and/or up to 113 (which is obtained by subtracting 1078 from 1191, the total amino acids number of KIAA1288(1191)) amino acids at the C-terminus of the KIAA1288(1191) sequence set forth in FIG. 22 does not render it unable to interact with FHOS.

[0174] The polypeptide sequence of KIAA1288(1191) set forth in FIG. 22 is identical to KIAA1288, GenBank accession number AB033114, except that 54 amino acids from 738 to 791 of KIAA1288 are deleted for KIAA1288(1191). The original cDNA encoding a fragment of KIAA1288 was isolated from a brain cDNA library and sequenced at the Kazusa DNA Research Institute in Japan (Nagase et al., DNA Res 1998; 5(6):355-64). Based on publicly available RT-PCR-ELIZA data (HUGE Protein Database), the mRNA encoding KIAA1288 is expressed in a broad range of tissues with relatively high expression in ovary and corpus callosum. C-terminal 240 amino acids sequence of KIAA1288 is known as ATIP1: AT2 receptor-interacting protein 1.

FHOS interacts with mVCL.

[0175] A bait comprising amino acids 1 to 250 (of 1164 total amino acids) of FHOS selected a single clone from a mouse embryo activation domain library comprising the polypeptide sequence of SEQ ID NO: 26, which corresponds with the highest homology to amino acids 29 to 475 (of 1066 total amino acids) of mVCL. The interacting fragments of the bait and prey should contain the minimal binding domain of each protein. Since the bait fragment of FHOS comprises amino acids 1 to 250, the sequence having a truncation of up to 914 (which is obtained by subtracting 250 from 1164, the total amino acids number of FHOS) amino acids at the C-terminus of the FHOS sequence set forth in FIG. 1 does not render it unable to interact with mVCL. Likewise, since the fragment of mVCL comprises amino acids 29 to 475, the sequence having a truncation of up to 28 amino acids at the N-terminus and/or up to 591 (which is obtained by subtracting 475 from 1066, the total amino acids number of mVCL) amino acids at the C-terminus of the mVCL sequence set forth in FIG. 23 does not render it unable to interact with FHOS.

[0176] mVCL, also known as vinculin or VINC, is the mouse ortholog of human Vcl. Vcl is a cytoskeletal protein associated with cell-cell and cell-matrix junctions, where it is thought to function as one of several interacting proteins involved in anchoring F-actin to the membrane.

FHOS interacts with mBC028274(908).

[0177] A bait comprising amino acids 1 to 348 (of 1164 total amino acids) of FHOS selected 2 clones from a mouse embryo activation domain library comprising the polypeptide sequences of SEQ ID NO: 55 and NO: 56, which correspond with the highest homology to amino acids 199 to 576 and 250 to 565 (of 908 total amino acids) of mBC028274(908), respectively. The interacting fragments of the bait and prey should contain the minimal binding domain of each protein. Since the bait fragment of FHOS comprises amino acids 1 to 348, the sequence having a truncation of up to 816 (which is obtained by subtracting 348 from 1164, the total amino acids number of FHOS) amino acids at the C-terminus of the FHOS sequence set forth in FIG. 1 does not render it unable to interact with mBC028274(908). Likewise, since the overlapping fragment of mBC028274(908) spans amino acids 250 to 565, the sequence having a truncation of up to 249 amino acids at the N-terminus and/or up to 343 (which is obtained by subtracting 565 from 908, the total amino acids number of mBC028274(908)) amino acids at the C-terminus of the mBC028274(908) sequence set forth in FIG. 27 does not render it unable to interact with FHOS.

[0178] The polypeptide sequence of mBC028274(908) set forth in FIG. 27 is generated by translating nucleotides 3-2726 of mBC028274 (GenBank accession number BC028274), since the corresponding polypeptide sequence of mBC028274 has not been disclosed in GenBank.

[0179] mBC028274 cDNA is a hypothetical protein with unknown function, which was isolated from mouse retina (IMAGE clone: 5401194). The polypeptide sequence encoded by mBC028274 gene is similar to human myomegalin, also known as phosphodiesterase 4D interacting protein (PDE4DIP, GenBank accession number NM_{—}014644). Structural analysis of mBC02827 predicts the presence of 2 internal repeat 1 (amino acids 412 to 453 and 635 to 676) and 5 coiled coil domains between amino acids 140 and 908.

FHOS interacts with mBC026864(777).

[0180] A bait comprising amino acids 1 to 348 (of 1164 total amino acids) of FHOS selected a single clone from a mouse embryo activation domain library comprising the polypeptide sequence of SEQ ID NO: 57, which corresponds with the highest homology to amino acids 256 to 417 (of 777 total amino acids) of mBC026864(777). The interacting fragments of the bait and prey should contain the minimal binding domain of each protein. Since the bait fragment of FHOS comprises amino acids 1 to 348, the sequence having a truncation of up to 816 (which is obtained by subtracting 348 from 1164, the total amino acids number of FHOS) amino acids at the C-terminus of the FHOS sequence set forth in FIG. 1 does not render it unable to interact with mBC026864(777). Likewise, since the fragment of mBC026864(777) comprises amino acids 256 to 417, the sequence having a truncation of up to 255 amino acids at the N-terminus and/or up to 360 (which is obtained by subtracting 417 from 777, the total amino acids number of mBC026864(777)) amino acids at the C-terminus of the mBC026864(777) sequence set forth in FIG. 28 does not render it unable to interact with FHOS.

[0181] The polypeptide sequence of mBC026864(777) set forth in FIG. 28 is identical to that of mBC026864 (GenBank accession number BC026864), except that 2 amino acids from 262 to 263 of mBC026864 are deleted for mBC026864(777). mBC026864 cDNA is a hypothetical protein with unknown function, which was isolated from mouse mammary tumor (MGC clone: 30562, IMAGE clone: 2647214). mBC026864 is similar to human meningioma expressed antigen 6 (MGEA6, GenBank accession number NM_{—}005930). Structural analysis of mBC026864(777) predicts the presence of a transmembrane domain at N-terminus amino acids 9 to 31, 2 internal repeat 1 (amino acids 584 to 639 and 611 to 664) and 2 coiled coil domains (amino acids 62 to 251 and 297 to 468).

FHOS interacts with m5730504C04Rik.

[0182] A bait comprising amino acids 1 to 384 (of 1164 total amino acids) of FHOS selected a single clone from a mouse embryo activation domain library comprising the polypeptide sequence of SEQ ID NO: 58, which corresponds with the highest homology to amino acids 127 to 407 (of 1236 total amino acids) of m5730504C04Rik. The interacting fragments of the bait and prey should contain the minimal binding domain of each protein. Since the bait fragment of FHOS comprises amino acids 1 to 384, the sequence having a truncation of up to 816 (which is obtained by subtracting 384 from 1164, the total amino acids number of FHOS) amino acids at the C-terminus of the FHOS sequence set forth in FIG. 1 does not render it unable to interact with m5730504C04Rik. Likewise, since the fragment of m5730504C04Rik comprises amino acids 127 to 407, the sequence having a truncation of up to 126 amino acids at the N-terminus and/or up to 829 (which is obtained by subtracting 407 from 1236, the total amino acids number of m5730504C04Rik) amino acids at the C-terminus of the m5730504C04Rik sequence set forth in FIG. 29 does not render it unable to interact with FHOS.

[0183] m5730504C04Rik is a hypothetical protein with unknown function, which was isolated as RIKEN cDNA 5730504C04Rik gene. m5730504C04Rik is the mouse ortholog of human myosin, heavy polypeptide 10 (MYH10, XM_{—}208977). Structural analysis of m5730504C04Rik predicts the presence of an IQ domain (short calmodulin-binding motif containing conserved Ile and Gln residues) (amino acids 45 to 67), a myosin tail (amino acids 333 to 1191) and an internal repeat 2 (amino acids 1200 to 1227). Based on publicly available EST data, the mRNA encoding m5730504CRik is expressed in various tissues including liver, testis, embryo, colon and brain.

FHOS interacts with mMYH9.

[0184] A bait comprising amino acids 1 to 348 (of 1164 total amino acids) of FHOS selected a single clone from a mouse embryo activation domain library comprising the polypeptide sequence of SEQ ID NO: 59, which corresponds with the highest homology to amino acids 853 to 1191 (of 1960 total amino acids) of mMYH9. The interacting fragments of the bait and prey should contain the minimal binding domain of each protein. Since the bait fragment of FHOS comprises amino acids 1 to 348, the sequence having a truncation of up to 816 (which is obtained by subtracting 384 from 1164, the total amino acids number of FHOS) amino acids at the C-terminus of the FHOS sequence set forth in FIG. 1 does not render it unable to interact with mMYH9. Likewise, since the fragment of mMYH9 comprises amino acids 853 to 1191, the sequence having a truncation of up to 852 amino acids at the N-terminus and/or up to 769 (which is obtained by subtracting 1191 from 1960, the total amino acids number of mMYH9) amino acids at the C-terminus of the mMYH9 sequence set forth in FIG. 30 does not render it unable to interact with FHOS. mMYH9, also known as mouse myosin heavy chain IX, is the mouse ortholog of human MYH9 (NM_{—}002473). MYH9 is a motor protein that provides force for muscle contraction, cytokinesis and phagocytosis. Mutations in MYH9 are known to be associated with Epstein syndrome, Fechtner syndrome, May-Hegglin anomaly and Sebastian syndrome. Structural analysis of mMYH9 predicts the presence of a myosin N-terminal SH3-like domain (amino acids 29 to 73), a myosin large ATPases domain (amino acids 75 to 777), an IQ domain (short calmodulin-binding motif containing conserved lie and Gln residues)(amino acids 778 and 800) and a myosin tail (amino acids 1066 to 1924). Based on publicly available EST data, the mRNA encoding mMYH9 is expressed in various tissues including liver, thymus, kidney, colon, embryo and brain.

FHOS interacts with mp116Rip.

[0185] A bait comprising amino acids 1 to 348 (of 1164 total amino acids) of FHOS selected 4 identical clones from a mouse embryo activation domain library comprising the polypeptide sequence of SEQ ID NO: 60, which corresponds with the highest homology to amino acids 943 to 1024 (of 1024 total amino acids) of mp116Rip. The interacting fragments of the bait and prey should contain the minimal binding domain of each protein. Since the bait fragment of FHOS comprises amino acids 1 to 348, the sequence having a truncation of up to 816 (which is obtained by subtracting 348 from 1164, the total amino acids number of FHOS) amino acids at the C-terminus of the FHOS sequence set forth in FIG. 1 does not render it unable to interact with mp116Rip. Likewise, since the fragment of mp116Rip comprises amino acids 943 to 1024, the sequence having a truncation of up to 942 amino acids at the N-terminus of the mp116Rip sequence set forth in FIG. 31 does not render it unable to interact with FHOS.

[0186] mp116Rip is a mouse brain protein that may be involved in control of the actin cytoskeleton. This protein is similar to human KIAA0864 (GenBank accession number AB020671). Structural analysis of mp116Rip predicts the presence of 2 Pleckstrin homology domains (amino acids 44 to 152 and 387 to 484) and 3 coiled coil domains (amino acids 672 to 707, 728 to 878 and 900 to 974). Based on publicly available EST data, the mRNA encoding mp116Rip is expressed in various tissues including lung, kidney, colon and brain.

FHOS interacts with TPM3.

[0187] A bait comprising amino acids 1 to 348 (of 1164 total amino acids) of FHOS selected 2 identical clones from a skeletal muscle activation domain library comprising the polypeptide sequence of SEQ ID NO: 61, which corresponds with the highest homology to amino acids 157 to 243 (of 243 total amino acids) of TPM3. The interacting fragments of the bait and prey should contain the minimal binding domain of each protein. Since the bait fragment of FHOS comprises amino acids 1 to 348, the sequence having a truncation of up to 816 (which is obtained by subtracting 348 from 1164, the total amino acids number of FHOS) amino acids at the C-terminus of the FHOS sequence set forth in FIG. 1 does not render it unable to interact with TPM3. Likewise, since the prey fragment of TPM3 comprises amino acids 157 to 243, the sequence having a truncation of up to 156 amino acids at the N-terminus of the TPM3 sequence set forth in FIG. 32 does not render it unable to interact with FHOS.

[0188] TPM3, also known as tropomyosin 3, is involved with neurotrophic tyrosine kinase receptor type 1 (NTRK1) in a somatic rearrangement that creates the chimeric TRK oncogene. Mutations in TPM3 are associated with nemaline myopathy. Structural analysis of TPM3 predicts the presence of a tropomyosin motif (amino acids 7 to 243). Based on publicly available EST data, the mRNA encoding TPM3 is expressed in various tissues including lung, thymus, spleen and liver.

FHOS interacts with MYH6.

[0189] A bait comprising amino acids 1 to 348 (of 1164 total amino acids) of FHOS selected a single clone from a skeletal muscle activation domain library comprising the polypeptide sequence of SEQ ID NO: 62, which corresponds with the highest homology to amino acids 876 to 1113 (of 1939 total amino acids) of MYH6. The interacting fragments of the bait and prey should contain the minimal binding domain of each protein. Since the bait fragment of FHOS comprises amino acids 1 to 348, the sequence having a truncation of up to 816 (which is obtained by subtracting 384 from 1164, the total amino acids number of FHOS) amino acids at the C-terminus of the FHOS sequence set forth in FIG. 1 does not render it unable to interact with MYH6. Likewise, since the fragment of MYH6 comprises amino acids 876 to 1113, the sequence having a truncation of up to 875 amino acids at the N-terminus and/or up to 826 (which is obtained by subtracting 1113 from 1939, the total amino acids number of MYH6) amino acids at the C-terminus of the MYH6 sequence set forth in FIG. 33 does not render it unable to interact with FHOS.

[0190] MYH6 is the cardiac muscle alpha (or fast) isoform of myosin heavy chain, a member of motor protein family that provides force for muscle contraction. Mutations in MYH6 are associated with late-onset hypertrophic cardiomyopathy. Structural analysis of MYH6 predicts the presence of a myosin N-terminal SH3-like domain (amino acids 34 to 77), a myosin large ATPases domain (amino acids 79 to 781), an IQ domain (short calmodulin-binding motif containing conserved Ile and Gln residues) (amino acids 782 and 804), a Myosin tail (amino acids 1070 to 1929) and an intermediate filaments (amino acids 1079 to 1361). Based on publicly available EST data, the mRNA encoding MYH6 is expressed in various tissues including lung, head, spleen and heart.

FHOS interacts with mMBLR.

[0191] A bait comprising amino acids 652 to 810 (of 1164 total amino acids) of FHOS selected 2 identical clones from a mouse embryo activation domain library comprising the polypeptide sequence of SEQ ID NO: 63, which corresponds with the highest homology to amino acids 41 to 209 (of 353 total amino acids) of mMBLR. The interacting fragments of the bait and prey should contain the minimal binding domain of each protein. Since the bait fragment of FHOS comprises amino acids 652 to 810, the sequence having a truncation of up to 651 amino acids at the N-terminus and/or up to 354 (which is obtained by subtracting 810 from 1164, the total amino acids number of FHOS) amino acids at the C-terminus of the FHOS sequence set forth in FIG. 1 does not render it unable to interact with mMBLR. Likewise, since the fragment of mMBLR comprises amino acids 41 to 209, the sequence having a truncation of up to 40 amino acids at the N-terminus and/or up to 144 (which is obtained by subtracting 209 from 353, the total amino acids number of mMBLR) amino acids at the C-terminus of the mMBLR sequence set forth in FIG. 34 does not render it unable to interact with FHOS.

[0192] mMBLR, also known as mouse Me118 and Bmi1 like ring finger protein, is the mouse ortholog of human MBLR (GenBank accession number NM_{—}032154). Serine 32 of MBLR is specifically phosphorylated during mitosis, most likely by CDK7 (Akasaka, T. et al, Genes Cells 2002; 7:835-850). Structural analysis of mMBLR predicts the presence of a ring finger domain (amino acids 137 to 175) and a coiled coil domain (amino acids 71 to 113). Based on publicly available EST data, the mRNA encoding mMBLR is expressed in various tissues including thymus, lung, kidney, spleen, colon and brain.

FHOS interacts with mZFP144.

[0193] A bait comprising amino acids 652 to 810 (of 1164 total amino acids) of FHOS selected 7 identical clones from a mouse embryo activation domain library comprising the polypeptide sequence of SEQ ID NO: 64, which corresponds with the highest homology to amino acids 7 to 304 (of 342 total amino acids) of mZFP144. The interacting fragments of the bait and prey should contain the minimal binding domain of each protein. Since the bait fragment of FHOS comprises amino acids 652 to 810, the sequence having a truncation of up to 651 amino acids at the N-terminus and/or up to 354 (which is obtained by subtracting 810 from 1164, the total amino acids number of FHOS) amino acids at the C-terminus of the FHOS sequence set forth in FIG. 1 does not render it unable to interact with mZFP144. Likewise, since the fragment of mZFP144 comprises amino acids 7 to 304, the sequence having a truncation of 6 amino acids at the N-terminus and/or up to 38 (which is obtained by subtracting 304 from 342, the total amino acids number of mZFP144) amino acids at the C-terminus of the mZFP144 sequence set forth in FIG. 35 does not render it unable to interact with FHOS.

[0194] mZFP144 is the mouse ortholog of human ZNF144 (GenBank accession number NM_{—}007144) and involved in the specification of the anterior-posterior axis in mice. Structural analysis of mZFP144 predicts the presence of a ring finger domain (amino acids 18 to 56). Based on publicly available EST data, the mRNA encoding mZFP144 is expressed in various tissues including heart, embryo, fetal liver and brain.

FHOS interacts with ZNF144(294).

[0195] A bait comprising amino acids 652 to 810 (of 1164 total amino acids) of FHOS selected 2 identical clones from an adipose activation domain library comprising the polypeptide sequence of SEQ ID NO: 65, which corresponds with the highest homology to full-length amino acids 1 to 294 (of 294 total amino acids) of ZNF144(294). The interacting fragments of the bait and prey should contain the minimal binding domain of each protein. Since the bait fragment of FHOS comprises amino acids 652 to 810, the sequence having a truncation of up to 651 amino acids at the N-terminus and/or up to 354 (which is obtained by subtracting 810 from 1164, the total amino acids number of FHOS) amino acids at the C-terminus of the FHOS sequence set forth in FIG. 1 does not render it unable to interact with ZNF144(294).

[0196] The polypeptide sequence of ZNF144(294) set forth in FIG. 36 is identical to that of ZNF144 (GenBank accession number NM_{—}007144), except that 50 amino acids from 256 to 305 of ZNF144 are deleted and the 306th amino acid of ZNF144 is altered from “A” to “S” for ZNF144(294).

[0197] ZNF 144, also known as MEL-18, is a cys-rich zinc finger motif protein that is expressed strongly in most tumor cell lines, but its normal tissue expression is limited to cells of neural origin and is especially abundant in fetal neural cells. Structural analysis of ZNF144 predicts the presence of a ring finger domain (amino acids 18 to 56).

[0198] The fact that FHOS interacts with mMBLR, mZFP144 and ZNF144 as described above suggests the biological importance of the interaction between FHOS and the ring finger protein containing MEL18 motif.

FHOS interacts with 14-3-3epsilon.

[0199] A bait comprising amino acids 652 to 810 (of 1164 total amino acids) of FHOS selected a single clone from an adipose activation domain library comprising the polypeptide sequence of SEQ ID NO: 66, which corresponds with the highest homology to amino acids 44 to 255 (of 1447 total amino acids) of 14-3-3epsilon. Another bait comprising amino acids 840 to 954 (of 1164 total amino acids) of FHOS selected 4 identical clones from an adipose activation domain library and 8 identical clones from a skeletal muscle activation domain library comprising the polypeptide sequences of SEQ ID NO: 67 and NO: 68, respectively. These polypeptide sequences correspond with the highest homology to amino acids 89 to 249 and 84 to 238 (of 1447 total amino acids) of 14-3-3epsilon, respectively. The interacting fragments of the bait and prey should contain the minimal binding domain of each protein. Since the bait fragments of FHOS comprise amino acids 652 to 810 and 840 to 954, respectively, the sequence having a truncation of up to 651 amino acids at the N-terminus and/or up to 354 (which is obtained by subtracting 810 from 1164, the total amino acids number of FHOS) amino acids at the C-terminus of the FHOS sequence set forth in FIG. 1 or the sequence having a truncation of up to 839 amino acids at the N-terminus and/or up to 210 (which is obtained by subtracting 954 from 1164, the total amino acids number of FHOS) amino acids at the C-terminus of the FHOS sequence set forth in FIG. 1 does not render it unable to interact with 14-3-3epsilon. Likewise, since the overlapping fragment of 14-3-3epsilon spans amino acids 89 to 238, the sequence having a truncation of up to 88 amino acids at the N-terminus and/or up to 17 (which is obtained by subtracting 238 from 255, the total amino acids number of 14-3-3epsilon) amino acids at the C-terminus of the 14-3-3epsilon sequence set forth in FIG. 37 does not render it unable to interact with FHOS.

[0200] The 14-3-3epsilon protein, also known as tyrosine 3-monooxygenase/tryptophan 5-monooxygenase activation protein, epsilon polypeptide, belongs to the 14-3-3 family of proteins which mediate signal transduction by binding to phosphoserine-containing proteins. This protein binds to cdc25 and may facilitate cdc25 interaction with Raf-1 in vivo. Structural analysis of 14-3-3epsilon predicts the presence of a 14-3-3 homologues domain (amino acids 4 to 245). Based on publicly available EST data, the mRNA encoding 14-3-3epsilon is expressed in various tissues including liver, lung, spleen, embryo, colon and brain.

FHOS interacts with BF672897(87).

[0201] A bait comprising amino acids 652 to 810 (of 1164 total amino acids) of FHOS selected a single clone from a skeletal muscle activation domain library comprising the polypeptide sequence of SEQ ID NO: 69, which corresponds with the highest homology to amino acids 1 to 87 (of 87 total amino acids) of BF672897(87). The interacting fragments of the bait and prey should contain the minimal binding domain of each protein. Since the bait fragment of FHOS comprises amino acids 652 to 810, the sequence having a truncation of up to 651 amino acids at the N-terminus and/or up to 354 (which is obtained by subtracting 810 from 1164, the total amino acids number of FHOS) amino acids at the C-terminus of the FHOS sequence set forth in FIG. 1 does not render it unable to interact with BF672897(87).

[0202] The polypeptide sequence of BF672897(87) set forth in FIG. 38 is generated by translating nucleotides 170-430 of BF672897 (GenBank accession number BF672897), since the corresponding polypeptide sequence of BF672897 has not been disclosed in GenBank.

[0203] BF672897 is a human EST encoding a hypothetical protein with unknown function. No highly homologous gene to BF672897 has been found in human cDNAs.

FHOS interacts with mCATNB.

[0204] A bait comprising amino acids 652 to 810 (of 1164 total amino acids) of FHOS selected a single clone from a mouse embryo activation domain library comprising the polypeptide sequence of SEQ ID NO: 70, which corresponds with the highest homology to amino acids 28 to 288 (of 781 total amino acids) of mCATNB. The interacting fragments of the bait and prey should contain the minimal binding domain of each protein. Since the bait fragment of FHOS comprises amino acids 652 to 810, the sequence having a truncation of up to 651 amino acids at the N-terminus and/or up to 354 (which is obtained by subtracting 810 from 1164, the total amino acids number of FHOS) amino acids at the C-terminus of the FHOS sequence set forth in FIG. 1 does not render it unable to interact with mCATNB. Likewise, since the fragment of mCATNB comprises amino acids 28 to 288, the sequence having a truncation of up to 27 amino acids at the N-terminus and/or up to 493 (which is obtained by subtracting 288 from 781, the total amino acids number of mCATNB) amino acids at the C-terminus of the mCATNB sequence set forth in FIG. 39 does not render it unable to interact with FHOS.

[0205] mCATNB is the mouse ortholog of human catenin (cadherin-associated protein) beta 1 (CTNNB1, GenBank accession number NM_{—}001904) and is involved in the regulation of cell adhesion and in signal transduction through the Wnt pathway. Regulation of CTNNB1 is known to be critical to the tumor suppressive effect of APC (adenomatous polyposis of the colon) and that this regulation can be circumvented by mutations in either APC or CATNB. Mutations in CTNNB1 are associated with colorectal cancer, hepatoblastoma, hepatocellular carcinoma, ovarian carcinoma and pilomatricoma. Structural analysis of mCATNB predicts the presence of 12 armadillo/beta-catenin-like repeats between amino acids 141 and 664. Based on publicly available EST data, the mRNA encoding mCATNB is expressed in various tissues including thymus, liver, embryo, colon and brain.

FHOS interacts with mCATNS.

[0206] A bait comprising amino acids 251 to 500 (of 1164 total amino acids) of FHOS selected 8 identical clones from a mouse embryo activation domain library comprising the polypeptide sequence of SEQ ID NO: 71, which corresponds with the highest homology to amino acids 704 to 871 (of 911 total amino acids) of mCATNS. The interacting fragments of the bait and prey should contain the minimal binding domain of each protein. Since the bait fragment of FHOS comprises amino acids 251 to 500, the sequence having a truncation of up to 250 amino acids at the N-terminus and/or up to 664 (which is obtained by subtracting 500 from 1164, the total amino acids number of FHOS) amino acids at the C-terminus of the FHOS sequence set forth in FIG. 1 does not render it unable to interact with mCATNS. Likewise, since the fragment of mCATNS comprises amino acids 704 to 871, the sequence having a truncation of up to 703 amino acids at the N-terminus and/or up to 40 (which is obtained by subtracting 871 from 911, the total amino acids number of mCATNS) amino acids at the C-terminus of the mCATNS sequence set forth in FIG. 40 does not render it unable to interact with FHOS.

[0207] mCATNS, also known as catenin src, is the mouse ortholog of human catenin delta 1 (CTNND, GenBank accession number NM_{—}001331). CTNND is an efficient tyrosine kinase substrate implicated both in cell transformation by src and ligand-induced receptor signaling through the EGF, PDGF, CSF-1 and ERBB receptors. CTNND may contribute to cell malignancy. A complete loss of CTNND expression was observed in approximately 10% of invasive ductal breast carcinomas investigated (Dillon et al., 1998 Am. J. Path. 152: 75-82). Structural analysis of mCATNS predicts the presence of a coiled coil domain (amino acids 10 to 45), 6 armadillo/beta-catenin-like repeats between amino acids 397 and 825 and an armadillo/beta-catenin-like repeat (amino acids 646 to 687). Based on publicly available EST data, the mRNA encoding mCATNS is expressed in various tissues including lung, embryo, colon and kidney.

FHOS interacts with mSWAN.

[0208] A bait comprising amino acids 251 to 500 (of 1164 total amino acids) of FHOS selected 4 identical clones and 3 identical clones from a mouse embryo activation domain library comprising the polypeptide sequences of SEQ ID NO: 72 and NO: 73, respectively. These polypeptide sequences correspond with the highest homology to amino acids 1 to 162 and 1 to 144 (of 1003 total amino acids) of mSWAN, respectively. The interacting fragments of the bait and prey should contain the minimal binding domain of each protein. Since the bait fragment of FHOS comprises amino acids 251 to 500, the sequence having a truncation of up to 250 amino acids at the N-terminus and/or up to 664 (which is obtained by subtracting 500 from 1164, the total amino acids number of FHOS) amino acids at the C-terminus of the FHOS sequence set forth in FIG. 1 does not render it unable to interact with mSWAN. Likewise, since the overlapping fragment of mSWAN spans amino acids 1 to 144, the sequence having a truncation of up to 859 (which is obtained by subtracting 144 from 1003, the total amino acids number of mSWAN) amino acids at the N-terminus of the mSWAN sequence set forth in FIG. 41 does not render it unable to interact with FHOS.

[0209] mSWAN is the mouse ortholog of human RNA binding motif protein 12 (RBM12, GenBank accession number NM_{—}006047). This protein contains several RNA-binding motifs between amino acids 305 and 1001, a glycine-rich region (amino acids 656 to 925) and 2 proline-rich regions (amino acids 159 to 256 and 644 to 926). Based on publicly available EST data, the mRNA encoding mSWAN is expressed in various tissues including lung, embryo, colon and thymus.

FHOS interacts with m2300003P22Rik(248).

[0210] A bait comprising amino acids 251 to 500 (of 1164 total amino acids) of FHOS selected a single clone from a mouse embryo activation domain library comprising the polypeptide sequence of SEQ ID NO: 74, which corresponds with the highest homology to amino acids 1 to 188 (of 248 total amino acids) of m2300003P22Rik(248). The interacting fragments of the bait and prey should contain the minimal binding domain of each protein. Since the bait fragment of FHOS comprises amino acids 251 to 500, the sequence having a truncation of up to 250 amino acids at the N-terminus and/or up to 664 (which is obtained by subtracting 500 from 1164, the total amino acids number of FHOS) amino acids at the C-terminus of the FHOS sequence set forth in FIG. 1 does not render it unable to interact with m2300003P22Rik(248). Likewise, since the fragment of m2300003P22Rik(248) comprises amino acids 1 to 188, the sequence having a truncation of up to 60 (which is obtained by subtracting 188 from 248, the total amino acids number of m2300003P22Rik(248)) amino acids at the C-terminus of the m2300003P22Rik(248) sequence set forth in FIG. 42 does not render it unable to interact with FHOS.

[0211] The cDNA encoding m2300003P22Rik(248) set forth in FIG. 42 includes predicted 5′ UTR of m2300003P22Rik (GenBank accession number NM_{—}026414), and thus encodes 98 amino acids at the N-terminus not predicted to be present in the native protein.

[0212] m2300003P22Rik was identified as a mouse 18 days embryo cDNA clone 230003P22 from RIKEN full-length enriched library. This hypothetical protein with unknown function is highly similar to human FLJ25084 (GenBank accession number NM_{—}152792). Structural analysis of m2300003P22Rik predicts the presence of a retroviral aspartyl protease motif (amino acids 98 to 205). Based on publicly available EST data, the mRNA encoding m2300003P22Rik is expressed in various tissues including lung, spleen, embryo and stomach.

FHOS interacts with mTAKEDA015.

[0213] A bait comprising amino acids 251 to 500 (of 1164 total amino acids) of FHOS selected 5 identical clones from a mouse embryo activation domain library comprising the polypeptide sequence of SEQ ID NO: 75, which corresponds with the highest homology to amino acids 1 to 261 (of 261 total amino acids) of mTAKEDA015. The interacting fragments of the bait and prey should contain the minimal binding domain of each protein. Since the bait fragment of FHOS comprises amino acids 251 to 500, the sequence having a truncation of up to 250 amino acids at the N-terminus and/or up to 664 (which is obtained by subtracting 500 from 1164, the total amino acids number of FHOS) amino acids at the C-terminus of the FHOS sequence set forth in FIG. 1 does not render it unable to interact with mTAKEDA015.

[0214] mTAKEDA015 (FIG. 43) is the partial amino acid sequence of the mouse ortholog of a human hypothetical protein with unknown function, KIAA0843 (GenBank accession number NM_{—}014945). The mRNA encoding KIAA0843 is expressed in various tissues, highly in liver and B. cerebellum. Structural analysis of mTAKEDA015 predicts the presence of 4 LIM domains (zinc-binding domain present in Lin-11, Isl-1, Mec-3) between amino acids 13 and 252.

FHOS interacts with PCNT2.

[0215] A bait comprising amino acids 251 to 500 (of 1164 total amino acids) of FHOS selected a single clone from a skeletal muscle activation domain library comprising the polypeptide sequence of SEQ ID NO: 76, which corresponds with the highest homology to amino acids 2942 to 3134 (of 3336 total amino acids) of PCNT2. The interacting fragments of the bait and prey should contain the minimal binding domain of each protein. Since the bait fragment of FHOS comprises amino acids 251 to 500, the sequence having a truncation of up to 250 amino acids at the N-terminus and/or up to 664 (which is obtained by subtracting 500 from 1164, the total amino acids number of FHOS) amino acids at the C-terminus of the FHOS sequence set forth in FIG. 1 does not render it unable to interact with PCNT2. Likewise, since the fragment of PCNT2 comprises amino acids 2942 to 3134, the sequence having a truncation of up to 2941 amino acids at the N-terminus and/or up to 202 (which is obtained by subtracting 3134 from 3336, the total amino acids number of PCNT2) amino acids at the C-terminus of the PCNT2 sequence set forth in FIG. 101 does not render it unable to interact with FHOS.

[0216] PCNT2, also known as pericentrin 2, KEN, PCN and PCNTB, is expressed in the centromere and an integral component of the pericentriolar material (PCM). This protein is found to bind to calmodulin, but its function has not been determined. Structural analysis of PCNT2 predicts the presence of 5 RPT (internal repeats) domains between amino acids 102 and 2633 and 10 coiled coil domains (amino acids 258 to 3082). Based on publicly available EST data, the mRNA encoding PCNT2 is expressed in various tissues including lung, liver, spleen and colon. FHOS interacts with KPNA4.

[0217] A bait comprising amino acids 251 to 500 (of 1164 total amino acids) of FHOS selected a single clone from a skeletal muscle activation domain library comprising the polypeptide sequence of SEQ ID NO: 77, which corresponds with the highest homology to amino acids 107 to 338 (of 521 total amino acids) of KPNA4. The interacting fragments of the bait and prey should contain the minimal binding domain of each protein. Since the bait fragment of FHOS comprises amino acids 251 to 500, the sequence having a truncation of up to 250 amino acids at the N-terminus and/or up to 664 (which is obtained by subtracting 500 from 1164, the total amino acids number of FHOS) amino acids at the C-terminus of the FHOS sequence set forth in FIG. 1 does not render it unable to interact with KPNA4. Likewise, since the fragment of KPNA4 comprises amino acids 107 to 338, the sequence having a truncation of up to 106 amino acids at the N-terminus and/or up to 183 (which is obtained by subtracting 338 from 521, the total amino acids number of KPNA4) amino acids at the C-terminus of the KPNA4 sequence set forth in FIG. 45 does not render it unable to interact with FHOS.

[0218] KPNA4, also known as karyopherin alpha 4, importin alpha 3, QIP1, SRP3, MGC12217 and MGC26703, is a cytoplasmic protein that recognizes nuclear localization signals (NLSs) and dock NLS-containing proteins to the nuclear pore complex. This protein is found to interact with the NLSs of DNA helicase Q1 and SV40 T antigen. Structural analysis of KPNA4 predicts the presence of 8 armadillo/beta-catenin-like repeats between amino acids 103 and 440 and an importin beta binding domain (amino acids 3 to 94). Based on publicly available EST data, the mRNA encoding KPNA4 is expressed in various tissues including kidney, brain, placenta, colon, lung and liver.

FHOS interacts with MAPKAP1.

[0219] A bait comprising amino acids 251 to 500 (of 1164 total amino acids) of FHOS selected 9 identical clones from a skeletal muscle activation domain library comprising the polypeptide sequence of SEQ ID NO: 78, which corresponds with the highest homology to amino acids 356 to 480 (of 486 total amino acids) of MAPKAP1. The interacting fragments of the bait and prey should contain the minimal binding domain of each protein. Since the bait fragment of FHOS comprises amino acids 251 to 500, the sequence having a truncation of up to 250 amino acids at the N-terminus and/or up to 664 (which is obtained by subtracting 500 from 1164, the total amino acids number of FHOS) amino acids at the C-terminus of the FHOS sequence set forth in FIG. 1 does not render it unable to interact with MAPKAP1. Likewise, since the prey fragment of MAPKAP1 comprises amino acids 356 to 480, the sequence having a truncation of up to 355 amino acids at the N-terminus and/or up to 6 (which is obtained by subtracting 480 from 486, the total amino acids number of MAPKAP1) amino acids at the C-terminus of the MAPKAP1 sequence set forth in FIG. 46 does not render it unable to interact with FHOS.

[0220] MAPKAP1, also known as SIN1 and MGC2745, is the mitogen-activated protein kinase associated protein 1. The cDNA of MAPKAP1 was originally isolated from lung small cell carcinoma and identified as MGC: 2745 and IMAGE: 2823015. This protein is found to be RAS inhibitor. Structural analysis of KPNA4 predicts the presence of 2 potential bipartite nuclear localization signals (amino acids 81 to 98 and 467 to 486). Based on publicly available EST data, the mRNA encoding MAPKAP1 is expressed in various tissues including placenta, liver, spleen, kidney, thymus and brain.

FHOS interacts with mTPT1.

[0221] A bait comprising amino acids 501 to 750 (of 1164 total amino acids) of FHOS selected a single clone from a mouse embryo activation domain library comprising the polypeptide sequence of SEQ ID NO: 79, which corresponds with the highest homology to amino acids 16 to 172 (of 172 total amino acids) of mTPT1. The interacting fragments of the bait and prey should contain the minimal binding domain of each protein. Since the bait fragment of FHOS comprises amino acids 501 to 750, the sequence having a truncation of up to 500 amino acids at the N-terminus and/or up to 414 (which is obtained by subtracting 750 from 1164, the total amino acids number of FHOS) amino acids at the C-terminus of the FHOS sequence set forth in FIG. 1 does not render it unable to interact with mTPT1. Likewise, since the fragment of mTPT1 comprises amino acids 16 to 172, the sequence having a truncation of up to 15 amino acids at the N-terminus of the mTPT1 sequence set forth in FIG. 47 does not render it unable to interact with FHOS.

[0222] mTPT1, also known as Trt and fortilin, is the tumor protein, translationally-controlled 1. The human ortholog, TPT1, is found to be the histamine-releasing factor. Structural analysis of mTPT1 predicts the presence of a translationally controlled tumor protein motif (amino acids 1 to 169). Based on publicly available EST data, the mRNA encoding mTPT1 is expressed in various tissues including lung, embryo, kidney, liver and brain.

FHOS interacts with mAK014397(679).

[0223] A bait comprising amino acids 501 to 750 (of 1164 total amino acids) of FHOS selected a single clone from a mouse embryo activation domain library comprising the polypeptide sequence of SEQ ID NO: 80, which corresponds with the highest homology to amino acids 441 to 640 (of 679 total amino acids) of mAK014397(679). The interacting fragments of the bait and prey should contain the minimal binding domain of each protein. Since the bait fragment of FHOS comprises amino acids 501 to 750, the sequence having a truncation of up to 500 amino acids at the N-terminus and/or up to 414 (which is obtained by subtracting 750 from 1164, the total amino acids number of FHOS) amino acids at the C-terminus of the FHOS sequence set forth in FIG. 1 does not render it unable to interact with mAK014397(679). Likewise, since the fragment of mAK014397(679) comprises amino acids 441 to 640, the sequence having a truncation of up to 440 amino acids at the N-terminus and/or up to 39 (which is obtained by subtracting 640 from 679, the total amino acids number of mAK014397(679)) amino acids at the C-terminus of the mAK014397(679) sequence set forth in FIG. 48 does not render it unable to interact with FHOS.

[0224] The polypeptide sequence of mAK014397(679) set forth in FIG. 48 is generated by translating nucleotides 3-2039 of mAK014397 (GenBank accession number AK014397), since the corresponding polypeptide sequence of mAK014397 has not been disclosed in GenBank.

[0225] mAK014397 was identified as a mouse adult male brain cDNA, RIKEN full-length enriched library, clone:3632413B07 by the FANTOM consortium and the RIKEN genome exploration research group. mAK014397 is a hypothetical protein with unknown function and is similar to human CTCL tumor antigen SE14-3 (GenBank accession number AF273045) and protein kinase C binding protein 1 (GenBank accession number NM_{—}012408). Structural analysis of mAK014397(679) predicts the presence of 2 internal repeat 1 (amino acids 74 to 201 and 84 to 211), 2 internal repeat 2 (amino acids 83 to 160 and 85 to 162), 2 internal repeat 3 (amino acids 77 to 124 and 99 to 147), a coiled coil domain (amino acids 415 to 477) and a MYND zinc finger domain (amino acids 488 to 522). Based on publicly available EST data, the mRNA encoding mAK014397 is expressed in various tissues including brain, hippocampus, lung, thymus, colon and kidney. 1

FHOS interacts with mHRMT1L1.

[0226] A bait comprising amino acids 501 to 750 (of 1164 total amino acids) of FHOS selected a single clone from a mouse embryo activation domain library comprising the polypeptide sequence of SEQ ID NO: 81, which corresponds with the highest homology to amino acids 19 to 205 (of 448 total amino acids) of mHRMT1L1. The interacting fragments of the bait and prey should contain the minimal binding domain of each protein. Since the bait fragment of FHOS comprises amino acids 501 to 750, the sequence having a truncation of up to 500 amino acids at the N-terminus and/or up to 414 (which is obtained by subtracting 750 from 1164, the total amino acids number of FHOS) amino acids at the C-terminus of the FHOS sequence set forth in FIG. 1 does not render it unable to interact with mHTMT1L1. Likewise, since the fragment of mHRMT1L1 comprises amino acids 19 to 205, the sequence having a truncation of up to 18 amino acids at the N-terminus and/or up to 243 (which is obtained by subtracting 205 from 448, the total amino acids number of mHRMT1L1) amino acids at the C-terminus of the mHRMT1L1 sequence set forth in FIG. 24 does not render it unable to interact with FHOS.

[0227] mHRMT1L1 (FIG. 49), also known as Prmt2, is the mouse heterogeneous nuclear ribonucleoprotein methyltransferase-like 1 and the mouse ortholog of human HRMT1L1 (GenBank accession number NM_{—}001535). HRMT1L1 may associate with hnRNPs. Structural analysis of mHRMT1L1 predicts the presence of a SH3 domain (Src homology 3 domains) (amino acids 45 to 100). Based on publicly available EST data, the mRNA encoding mHRMT1L1 is expressed in various tissues including lung, ovary, liver, kidney, heart, embryo, colon and brain.

FHOS interacts with HRMT1L1(241).

[0228] A bait comprising amino acids 501 to 750 (of 1164 total amino acids) of FHOS selected 10 identical clones from an adipose activation domain library comprising the polypeptide sequence of SEQ ID NO: 82, which corresponds with the highest homology to amino acids 2 to 241 (of 241 total amino acids) of HRMT1L1(241). The interacting fragments of the bait and prey should contain the minimal binding domain of each protein. Since the bait fragment of FHOS comprises amino acids 501 to 750, the sequence having a truncation of up to 500 amino acids at the N-terminus and/or up to 414 (which is obtained by subtracting 750 from 1164, the total amino acids number of FHOS) amino acids at the C-terminus of the FHOS sequence set forth in FIG. 1 does not render it unable to interact with HRMT1L1(241). Likewise, since the fragment of HRMT1L1(241) comprises amino acids 2 to 241, the sequence having a truncation of up to 1 amino acid at the N-terminus of the HRMT1L1(241) sequence set forth in FIG. 50 does not render it unable to interact with FHOS.

[0229] The polypeptide sequence of HRMT1L1(241) set forth in FIG. 50 is identical to that of HRMT1L1(GenBank accession number NM_{—}001535), except that the C-terminal 215 amino acids from 219 to 433 of HRMT1L1 are altered to “KQQSSEGDASKDTTGVLDCQQTI” for HRMT1L1(241).

[0230] HRMT1L1, also known as PRMT2, is the hnRNP methyltransferase-like 1. Similar to arginine methyltransferase, HRMT1L1 may act on RNA-binding proteins such as hnRNPs. Structural analysis of HRMT1L1 predicts the presence of a SH3 domain (src homology 3 domains) (amino acids 33 to 88).

FHOS interacts with SAT(204).

[0231] A bait comprising amino acids 501 to 750 (of 1164 total amino acids) of FHOS selected a single clone from an adipose activation domain library comprising the polypeptide sequence of SEQ ID NO: 83, which corresponds with the highest homology to amino acids 1 to 186 (of 204 total amino acids) of SAT(204). The interacting fragments of the bait and prey should contain the minimal binding domain of each protein. Since the bait fragment of FHOS comprises amino acids 501 to 750, the sequence having a truncation of up to 500 amino acids at the N-terminus and/or up to 414 (which is obtained by subtracting 750 from 1164, the total amino acids number of FHOS) amino acids at the C-terminus of the FHOS sequence set forth in FIG. 1 does not render it unable to interact with SAT(204). Likewise, since the fragment of SAT(204) comprises amino acids 1 to 186, the sequence having a truncation of up to 18 (which is obtained by subtracting 186 from 204, the total amino acids number of SAT(204)) amino acids at the C-terminus of the SAT(204) sequence set forth in FIG. 51 does not render it unable to interact with FHOS.

[0232] The cDNA encoding SAT(204) set forth in FIG. 51 includes predicted 5′ UTR of SAT (GenBank accession number NM_{—}002970), and thus encodes 33 amino acids at the N-terminus not predicted to be present in the native protein.

[0233] SAT, also known as SSAT, is the spermidine/spermine N1-acetyltransferase and catalyzes rate-limiting step in polyamine catabolism. SAT catalyzes the N(1)-acetylation of spermidine and spermine and, by the successive activity of polyamine oxidase, spermine can be converted to spermidine and spermidine to putrescine. SAT expression may be associated with Keratosis follicularis spinulosa decalvans (KFSD) or Siemens-I syndrome (Gimelli et al., 2002, Hum. Genet. 111, 235-241). Structural analysis of SAT(204) predicts the presence of an acetyltransferase (GNAT) family motif (amino acids 96 to 179). Based on publicly available EST data, the mRNA encoding SAT is expressed in various tissues including lung, placenta, liver, spleen, kidney and brain.

FHOS interacts with BC023995(305).

[0234] A bait comprising amino acids 501 to 750 (of 1164 total amino acids) of FHOS selected 6 identical clones and another 6 identical clones from a skeletal muscle activation domain library comprising the polypeptide sequences of SEQ ID NO: 84 and NO: 85, respectively. These polypeptide sequences correspond with the highest homology to amino acids 1 to 294 and 72 to 299 (of 305 total amino acids) of BC023995(305), respectively. The interacting fragments of the bait and prey should contain the minimal binding domain of each protein. Since the bait fragment of FHOS comprises amino acids 501 to 750, the sequence having a truncation of up to 500 amino acids at the N-terminus and/or up to 414 (which is obtained by subtracting 750 from 1164, the total amino acids number of FHOS) amino acids at the C-terminus of the FHOS sequence set forth in FIG. 1 does not render it unable to interact with BC023995(305). Likewise, since the overlapping fragment of BC023995(305) spans amino acids 72 to 294, the sequence having a truncation of up to 71 amino acids at the N-terminus and/or up to 11 (which is obtained by subtracting 294 from 305, the total amino acids number of BC023995(305)) amino acids at the C-terminus of the BC023995(305) sequence set forth in FIG. 52 does not render it unable to interact with FHOS.

[0235] The cDNA encoding BC023995(305) set forth in FIG. 52 includes predicted 5′ UTR of BC023995 (GenBank accession number BC023995), and thus encodes 9 amino acids at the N-terminus not predicted to be present in the native protein.

[0236] BC023995 is a hypothetical protein with unknown, which was identified from brain glioblastoma function (clone MGC: 24534 IMAGE: 4103877). Based on publicly available EST data, the mRNA encoding BC023995 is expressed in various tissues including placenta, kidney, brain, spleen, liver and lung.

FHOS interacts with TTN.

[0237] A bait comprising amino acids 501 to 750 (of 1164 total amino acids) of FHOS selected a single clone from a skeletal muscle activation domain library comprising the polypeptide sequence of SEQ ID NO: 86, which corresponds with the highest homology to amino acids 26343 to 26503 (of 27118 total amino acids) of TTN. The interacting fragments of the bait and prey should contain the minimal binding domain of each protein. Since the bait fragment of FHOS comprises amino acids 501 to 750, the sequence having a truncation of up to 500 amino acids at the N-terminus and/or up to 414 (which is obtained by subtracting 750 from 1164, the total amino acids number of FHOS) amino acids at the C-terminus of the FHOS sequence set forth in FIG. 1 does not render it unable to interact with TTN. Likewise, since the fragment of TTN comprises amino acids 26343 to 26503, the sequence having a truncation of up to 26342 amino acids at the N-terminus and/or up to 615 (which is obtained by subtracting 26503 from 27118, the total amino acids number of TTN) amino acids at the C-terminus of the TTN sequence set forth in FIG. 53 does not render it unable to interact with FHOS.

[0238] TTN, also known as connectin, is the largest known protein. Although discovered many years ago, due to its tremendous size, the complete cDNA sequence for TTN was not determined until 1995. Structural analysis of TTN reveals that 90% of its mass is contained in 112 immunoglobulin-like repeats and 132 fibronectin type 3 repeats. TTN is thought to function both as a scaffold for muscle fiber formation in developing muscle tissue and as a major structural component of both skeletal and cardiac. Mutations in the TTN gene have been observed in several different cardiac and skeletal muscle diseases, including familial dilated cardiomyopathy (Gerull et al., 2002, Nature Genet. 30, 201-204) and tibial muscular dystrophy (Hackman et al., 2002, Am. J. Hum. Genet. 71, 492-500). Thus TTN clearly plays a major role in muscle development and function. Based on publicly available EST data, the mRNA encoding TTN is expressed in various tissues including heart, lung, liver, spleen and embryo.

FHOS interacts with mLRRFIP1.

[0239] A bait comprising amino acids 810 to 1100 (of 1164 total amino acids) of FHOS selected 6 identical clones from a mouse embryo activation domain library comprising the polypeptide sequence of SEQ ID NO: 118, which corresponds with the highest homology to amino acids 129 to 328 (of 628 total amino acids) of mLRRF1P1. The interacting fragments of the bait and prey should contain the minimal binding domain of each protein. Since the bait fragment of FHOS comprises amino acids 810 to 1100, the sequence having a truncation of up to 809 amino acids at the N-terminus and/or up to 64 (which is obtained by subtracting 1100 from 1164, the total amino acids number of FHOS) amino acids at the C-terminus of the FHOS sequence set forth in FIG. 1 does not render it unable to interact with mLRRF1P1. Likewise, since the fragment of mLRRF1P1 comprises amino acids 129 to 328, the sequence having a truncation of up to 128 amino acids at N-terminus and/or up to 300 (which is obtained by subtracting 328 from 628, the total amino acids number of mLRRF1P1) amino acids at the C-terminus of the mLRRF1P1 sequence set forth in FIG. 58 does not render it unable to interact with FHOS.

[0240] mLRRFIP1, also known as Fliiap 1 and Flap, is the Mus musculus leucine rich repeat (in FLII) interacting protein I and the mouse ortholog of human LRRFIP1. LRRFIP1 has a double-stranded RNA binding activity and may provide a link between RNA and the actin cytoskeleton. Structural analysis of mLRRFIP1 predicts the presence of 3 coiled coil domains (amino acids 249 to 431, 473 to 508 and 530 to 618). Based on publicly available EST data, the mRNA encoding mLRRFIP1 is expressed in various tissues including kidney, thymus, liver, lung, spleen and brain. FHOS interacts with mAPC2.

[0241] A bait comprising amino acids 810 to 1100 (of 1164 total amino acids) of FHOS selected 2 identical clones from a mouse embryo activation domain library comprising the polypeptide sequence of SEQ ID NO: 119, which corresponds with the highest homology to amino acids 12 to 148 (of 2274 total amino acids) of mAPC2. The interacting fragments of the bait and prey should contain the minimal binding domain of each protein. Since the bait fragment of FHOS comprises amino acids 810 to 1100, the sequence having a truncation of up to 809 amino acids at the N-terminus and/or up to 64 (which is obtained by subtracting 1100 from 1164, the total amino acids number of FHOS) amino acids at the C-terminus of the FHOS sequence set forth in FIG. 1 does not render it unable to interact with mAPC2. Likewise, since the fragment of mAPC2 comprises amino acids 12 to 148, the sequence having a truncation of up to 11 amino acids at N-terminus and/or up to 2126 (which is obtained by subtracting 148 from 2274, the total amino acids number of mAPC2) amino acids at the C-terminus of the mAPC2 sequence set forth in FIG. 59 does not render it unable to interact with FHOS.

[0242] mAPC2, Mus musculus adenomatosis polyposis coli 2, is a hypothetical protein with unknown function and the mouse ortholog of human APCL (GenBank accession number NM_{—}005883). APCL is similar to the tumor suppressor APC and has the binding activity with beta catenin (Nakagawa et al., 1998 Cancer Res. 58, 5176-5181). Structural analysis of mAPC2 predicts the presence of 2 coiled coil domains (amino acids 1 to 43 and 214 to 236) and 6 armadillo/beta-catenin-like repeats between amino acids 300 and 689. Based on publicly available EST data, the mRNA encoding mAPC2 is expressed in various tissues including brain, embryo, test is and egg.

FHOS interacts with mCYLN2(1047).

[0243] A bait comprising amino acids 840 to 954 (of 1164 total amino acids) of FHOS selected 3 identical clones from a mouse embryo activation domain library comprising the polypeptide sequence of SEQ ID NO: 120, which corresponds with the highest homology to amino acids 631 to 996 (of 1047 total amino acids) of mCYLN2(1047). The interacting fragments of the bait and prey should contain the minimal binding domain of each protein. Since the bait fragment of FHOS comprises amino acids 840 to 954, the sequence having a truncation of up to 839 amino acids at the N-terminus and/or 210 (which is obtained by subtracting 954 from 1164, the total amino acids number of FHOS) amino acids at the C-terminus of the FHOS sequence set forth in FIG. 1 does not render it unable to interact with mCYLN2(1047). Likewise, since the fragment of mCYLN2(1047) comprises amino acids 631 to 996, the sequence having a truncation of up to 630 amino acids at N-terminus and/or up to 51 (which is obtained by subtracting 996 from 1047, the total amino acids number of mCYLN2(1047)) amino acids at the C-terminus of the mCYLN2(1047) sequence set forth in FIG. 60 does not render it unable to interact with FHOS.

[0244] The polypeptide sequence of mCYLN2(1047) set forth in FIG. 60 is identical to that of mCYLN2 (GenBank accession number NM_{—}009990), except that 6 amino acids from 713 to 718 of mCYLN2 are altered from “AASAEA” to “SQHRLEL” for mCYLN2(1047).

[0245] mCYLN2, also known as Clip1, WSCR4, wbscr4, CLIP-115 and B230327020, is the mouse ortholog of human CYLN2 (GenBank accession number NM_{—}003388). CYLN2 belongs to the family of cytoplasmic linker proteins and was found to associate with both microtubules and a dendritic lamellar body. The gene encoding CYLN2 is hemizygously deleted in Williams syndrome (Osborne et al., 1996 Genomics 36, 328-336). Structural analysis of mCYLN2 predicts the presence of 2 CAP-Gly (cytoskeleton-associated proteins-glycine rich) domains (amino acids 100 to 142 and 240 to 282), 3 coiled coil domains (amino acids 355 to 496, 564 to 613 and 675 to 1017) and 2 internal repeat 2 (amino acids 615 to 652 and 633 to 670). Based on publicly available EST data, the mRNA encoding CYLN2 is expressed in various tissues including thymus, brain, pancreas, heart and skeletal muscle.

FHOS interacts with mACTN3.

[0246] A bait comprising amino acids 840 to 954 (of 1164 total amino acids) of FHOS selected 21 identical clones from a mouse embryo activation domain library comprising the polypeptide sequence of SEQ ID NO: 121, which corresponds with the highest homology to amino acids 355 to 508 (of 900 total amino acids) of mACTN3. The interacting fragments of the bait and prey should contain the minimal binding domain of each protein. Since the bait fragment of FHOS comprises amino acids 840 to 954, the sequence having a truncation of up to 839 amino acids at the N-terminus and/or 210 (which is obtained by subtracting 954 from 1164, the total amino acids number of FHOS) amino acids at the C-terminus of the FHOS sequence set forth in FIG. 1 does not render it unable to interact with mACTN3. Likewise, since the fragment of mACTN3 comprises amino acids 355 to 508, the sequence having a truncation of up to 354 amino acids at N-terminus and/or up to 392 (which is obtained by subtracting 508 from 900, the total amino acids number of mACTN3) amino acids at the C-terminus of the mACTN3 sequence set forth in FIG. 61 does not render it unable to interact with FHOS.

[0247] mACTN3 is the mouse ortholog of human actinin alpha 3 (ACTN3, GenBank accession number NM_{—}001104). ACTN3 is an actin-binding protein and its expression is limited to skeletal muscle. This protein is localized to the Z-disc and analogous dense bodies and has the role of anchoring the myofibrillar actin filaments. Structural analysis of mACTN3 predicts the presence of 2 calponin homology domains (amino acids 46 to 146 and 159 to 258), 2 spectrin repeats (amino acids 410 to 511 and 525 to 632), 2 spectrin repeats (Pfam data) (amino acids 287 to 397 and 643 to 746) and 2 EF-hand, calcium binding motifs (amino acids 763 to 791 and 799 to 827).

FHOS interacts with mDTNBP1.

[0248] A bait comprising amino acids 840 to 954 (of 1164 total amino acids) of FHOS selected 2 identical clones from a mouse embryo activation domain library comprising the polypeptide sequence of SEQ ID NO: 122, which corresponds with the highest homology to amino acids 1 to 242 (of 352 total amino acids) of mDTNBP1. The interacting fragments of the bait and prey should contain the minimal binding domain of each protein. Since the bait fragment of FHOS comprises amino acids 840 to 954, the sequence having a truncation of up to 839 amino acids at the N-terminus and/or 210 (which is obtained by subtracting 954 from 1164, the total amino acids number of FHOS) amino acids at the C-terminus of the FHOS sequence set forth in FIG. 1 does not render it unable to interact with mDTNBP1. Likewise, since the fragment of mDTNBP1 comprises amino acids 1 to 242, the sequence having a truncation of up to 110 (which is obtained by subtracting 242 from 352, the total amino acids number of mDTNBP1) amino acids at the C-terminus of the mDTNBP1 sequence set forth in FIG. 62 does not render it unable to interact with FHOS.

[0249] mDTNBP1, also known as dysbindin and 5430437B18Rik, is the mouse ortholog of human dystrobrevin binding protein 1 (DTNBP1, GenBank accession number NM_{—}032122). mDTNBP1 was originally isolated in a yeast 2-hybrid screening from adult mouse brain and myotube cDNA libraries (Benson et al., 2001 J. Biol. Chem. 276, 24232-24241). Single nucleotide polymorphisms within the gene DTNBP1 are strongly associated with schizophrenia (Straub et al., 2002 Am. J. Hum. Genet. 71, 337-348). Structural analysis of mDTNBP1 predicts the presence of a coiled coil domain (amino acids 92 to 175). Based on publicly available EST data, the mRNA encoding mDTNBP1 is expressed in various tissues including kidney, testis, placenta, thymus, liver, spleen and brain.

FHOS interacts with mTAKEDA013.

[0250] A bait comprising amino acids 840 to 954 (of 1164 total amino acids) of FHOS selected a single clone from a mouse embryo activation domain library comprising the polypeptide sequence of SEQ ID NO: 123, which corresponds with the highest homology to amino acids 1 to 197 (of 197 total amino acids) of mTAKEDA013. The interacting fragments of the bait and prey should contain the minimal binding domain of each protein. Since the bait fragment of FHOS comprises amino acids 840 to 954, the sequence having a truncation of up to 839 amino acids at the N-terminus and/or 210 (which is obtained by subtracting 954 from 1164, the total amino acids number of FHOS) amino acids at the C-terminus of the FHOS sequence set forth in FIG. 1 does not render it unable to interact with mTAKEDA013.

[0251] mTAKEDA013 (FIG. 63) is the partial amino acid sequence of the mouse ortholog of human spectrin alpha, non-erythrocytic 1, also known as alpha-fodlin (SPTAN1, GenBank accession number NM_{—}003127). SPTAN1 has an actin binding activity and may crosslink actin proteins of the membrane-associated cytoskeleton. Structural analysis of mTAKEDA013 predicts the presence of 2 spectrin repeats (amino acids 13 to 113 and 119 to 197).

FHOS interacts with m14-3-3g.

[0252] A bait comprising amino acids 840 to 954 (of 1164 total amino acids) of FHOS selected 2 identical clones from a mouse embryo activation domain library comprising the polypeptide sequence of SEQ ID NO: 124, which corresponds with the highest homology to amino acids 73 to 247 (of 247 total amino acids) of m14-3-3g. The interacting fragments of the bait and prey should contain the minimal binding domain of each protein. Since the bait fragment of FHOS comprises amino acids 840 to 954, the sequence having a truncation of up to 839 amino acids at the N-terminus and/or 210 (which is obtained by subtracting 954 from 1164, the total amino acids number of FHOS) amino acids at the C-terminus of the FHOS sequence set forth in FIG. 1 does not render it unable to interact with m14-3-3g. Likewise, since the fragment of m14-3-3g comprises amino acids 73 to 247, the sequence having a truncation of up to 72 amino acids at the N-terminus of the m14-3-3g sequence set forth in FIG. 64 does not render it unable to interact with FHOS.

[0253] m14-3-3g is the tyrosine 3-monooxygenase/tryptophan 5-monooxygenase activation protein gamma polypeptide and the mouse ortholog of human 14-3-3gamma (GenBank accession number AB024334). This protein belongs to the 14-3-3 family of proteins which mediate signal transduction by binding to phosphoserine-containing proteins. The protein 14-3-3gamma interacts with multiple protein kinase C isoforms in PDGF-stimulated vascular smooth muscle cells (Autieri et al., 1999 DNA Cell Biol. 18, 555-564). Structural analysis of m14-3-3g predicts the presence of a 14-3-3 homologues (amino acids 4 to 247). Based on publicly available EST data, the mRNA encoding m14-3-3g is expressed in various tissues including spleen, liver, thymus, kidney, placenta, lung, pancreas and brain. FHOS interacts with m14-3-3zeta.

[0254] A bait comprising amino acids 840 to 954 (of 1164 total amino acids) of FHOS selected 7 identical clones from a mouse embryo activation domain library comprising the polypeptide sequence of SEQ ID NO: 125, which corresponds with the highest homology to amino acids 56 to 245 (of 245 total amino acids) of m14-3-3zeta. The interacting fragments of the bait and prey should contain the minimal binding domain of each protein. Since the bait fragment of FHOS comprises amino acids 840 to 954, the sequence having a truncation of up to 839 amino acids at the N-terminus and/or 210 (which is obtained by subtracting 954 from 1164, the total amino acids number of FHOS) amino acids at the C-terminus of the FHOS sequence set forth in FIG. 1 does not render it unable to interact with m14-3-3zeta. Likewise, since the fragment of m14-3-3zeta comprises amino acids 56 to 245, the sequence having a truncation of up to 55 amino acids at the N-terminus of the m14-3-3zeta sequence set forth in FIG. 65 does not render it unable to interact with FHOS.

[0255] m14-3-3zeta is the tyrosine 3-monooxygenase/tryptophan 5-monooxygenase activation protein, zeta polypeptide and the mouse ortholog of human 14-3-3zeta (GenBank accession number NM_{—}003406). This protein belongs to the 14-3-3 family of proteins which mediate signal transduction by binding to phosphoserine-containing proteins. The protein 14-3-3zeta is found to associate with IRSI (Ogihara et al., 1997 J. Biol. Chem. 277, 21639-21642) and protein kinase B/Akt1 (Powell et al., 2002 J. Biol. Chem. 277, 21639-21642). Structural analysis of m14-3-3zeta predicts the presence of a 14-3-3 homologues domain (amino acids 3 to 242). Based on publicly available EST data, the mRNA encoding m14-3-3zeta is expressed in various tissues including kidney, thymus placenta, embryo, colon and brain.

FHOS interacts with 14-3-3zeta.

[0256] A bait comprising amino acids 840 to 954 (of 1164 total amino acids) of FHOS selected 28 identical clones and another 8 identical clones from an adipose activation domain library comprising the polypeptide sequences of SEQ ID NO: 126 and NO: 14, respectively. These polypeptide fragments correspond with the highest homology to amino acids 19 to 245 and 20 to 210 (of 245 total amino acids) of 14-3-3zeta, respectively. The interacting fragments of the bait and prey should contain the minimal binding domain of each protein. Since the bait fragment of FHOS comprises amino acids 840 to 954, the sequence having a truncation of up to 839 amino acids at the N-terminus and/or 210 (which is obtained by subtracting 954 from 1164, the total amino acids number of FHOS) amino acids at the C-terminus of the FHOS sequence set forth in FIG. 1 does not render it unable to interact with 14-3-3zeta. Likewise, since the overlapping fragment of 14-3-3zeta spans amino acids 20 to 210, the sequence having a truncation of up to 19 amino acids at the N-terminus and/or up to 35 (which is obtained by subtracting 210 from 245, the total amino acids number of 14-3-3zeta) amino acids at the C-terminus of the 14-3-3zeta sequence set forth in FIG. 66 does not render it unable to interact with FHOS.

[0257] 14-3-3zeta, also known as KCIP-1, phospholipase A2 and protein kinase C inhibitor protein-1, is the tyrosine 3-monooxygenase/tryptophan 5-monooxygenase activation protein, zeta. This protein belongs to the 14-3-3 family of proteins which mediate signal transduction by binding to phosphoserine-containing proteins. The protein 14-3-3zeta is found to associate with IRSI (Ogihara et al., 1997 J. Biol. Chem. 277, 21639-21642) and protein kinase B/Akt1 (Powell et al., 2002 J. Biol. Chem. 277, 21639-21642). Structural analysis of 14-3-3zeta predicts the presence of a 14-3-3 homologues domain (amino acids 3 to 242). Based on publicly available EST data, the mRNA encoding 14-3-3zeta is expressed in various tissues including lung, placenta, embryo, kidney and brain.

FHOS interacts with m14-3-3b.

[0258] A bait comprising amino acids 840 to 954 (of 1164 total amino acids) of FHOS selected 8 identical clones from a mouse embryo activation domain library comprising the polypeptide sequence of SEQ ID NO: 128, which corresponds with the highest homology to amino acids 59 to 230 (of 246 total amino acids) of m14-3-3b. The interacting fragments of the bait and prey should contain the minimal binding domain of each protein. Since the bait fragment of FHOS comprises amino acids 840 to 954, the sequence having a truncation of up to 839 amino acids at the N-terminus and/or 210 (which is obtained by subtracting 954 from 1164, the total amino acids number of FHOS) amino acids at the C-terminus of the FHOS sequence set forth in FIG. 1 does not render it unable to interact with m14-3-3b. Likewise, since the fragment of m14-3-3b comprises amino acids 59 to 230, the sequence having a truncation of 58 amino acids at N-terminus and/or up to 16 (which is obtained by subtracting 230 from 246, the total amino acids number of m14-3-3b) amino acids at the C-terminus of the m 14-3-3b sequence set forth in FIG. 67 does not render it unable to interact with FHOS.

[0259] m14-3-3b was identified as Mus musculus 10 days embryo whole body cDNA, RIKEN full-length enriched library, clone 2610014A20 and the mouse ortholog of human tyrosine 3-monooxygenase/tryptophan 5-monooxygenase activation protein, beta polypeptide (GenBank accession number NM_{—}003404). This protein belongs to the 14-3-3 family of proteins which mediate signal transduction by binding to phosphoserine-containing proteins. 14-3-3b has been shown to interact with RAF1 and CDC25 phosphatases and may play a role in linking mitogenic signaling and the cell cycle machinery. Structural analysis of m14-3-3b predicts the presence of a 14-3-3 homologues domain (amino acids 5 to 244). Based on publicly available EST data, the mRNA encoding m14-3-3b is expressed in various tissues including thymus, kidney, lung, liver, embryo, colon and brain. FHOS interacts with m14-3-3theta.

[0260] A bait comprising amino acids 840 to 954 (of 1164 total amino acids) of FHOS selected 2 identical clones from a mouse embryo activation domain library comprising the polypeptide sequence of SEQ ID NO: 129, which corresponds with the highest homology to amino acids 82 to 245 (of 245 total amino acids) of m14-3-3theta. The interacting fragments of the bait and prey should contain the minimal binding domain of each protein. Since the bait fragment of FHOS comprises amino acids 840 to 954, the sequence having a truncation of up to 839 amino acids at the N-terminus and/or 210 (which is obtained by subtracting 954 from 1164, the total amino acids number of FHOS) amino acids at the C-terminus of the FHOS sequence set forth in FIG. 1 does not render it unable to interact with m14-3-3theta. Likewise, since the fragment of m14-3-3theta comprises amino acids 82 to 245, the sequence having a truncation of 81 amino acids at N-terminus of the m14-3-3theta sequence set forth in FIG. 68 does not render it unable to interact with FHOS.

[0261] m14-3-3theta is the mouse tyrosine 3-monooxygenase/tryptophan 5-monooxygenase activation protein, theta polypeptide and the mouse ortholog of human 14-3-3theta (GenBank accession number NM_{—}006826). This protein belongs to the 14-3-3 family of proteins which mediate signal transduction by binding to phosphoserine-containing proteins. The gene encoding 14-3-3theta is upregulated in patients with amyotrophic lateral sclerosis (Malaspina et al., 2000 J. Neurochem. 75, 2511-2520). Structural analysis of m14-3-3theta predicts the presence of a 14-3-3 homologues domain (amino acids 3 to 242). Based on publicly available EST data, the mRNA encoding m14-3-3theta is expressed in various tissues including kidney, spleen, thymus, liver, embryo, colon and brain.

FHOS interacts with 14-3-3theta.

[0262] A bait comprising amino acids 840 to 954 (of 1164 total amino acids) of FHOS selected 2 identical clones from an adipose activation domain library comprising the polypeptide sequence of SEQ ID NO: 130, which corresponds with the highest homology to amino acids 81 to 245 (of 245 total amino acids) of 14-3-3theta. The interacting fragments of the bait and prey should contain the minimal binding domain of each protein. Since the bait fragment of FHOS comprises amino acids 840 to 954, the sequence having a truncation of up to 839 amino acids at the N-terminus and/or 210 (which is obtained by subtracting 954 from 1164, the total amino acids number of FHOS) amino acids at the C-terminus of the FHOS sequence set forth in FIG. 1 does not render it unable to interact with 14-3-3theta. Likewise, since the fragment of 14-3-3theta comprises amino acids 81 to 245, the sequence having a truncation of up to 80 amino acids at N-terminus of the 14-3-3theta sequence set forth in FIG. 69 does not render it unable to interact with FHOS.

[0263] 14-3-3theta, also known as IC5, HS1 and 14-3-3 protein tau, is the tyrosine 3-monooxygenase/tryptophan 5-monooxygenase activation protein, theta polypeptide and belongs to the 14-3-3 family of proteins which mediate signal transduction by binding to phosphoserine-containing proteins. The gene encoding 14-3-3theta is upregulated in patients with amyotrophic lateral sclerosis (Malaspina et al., 2000 J. Neurochem. 75, 2511-2520). Structural analysis of 14-3-3theta predicts the presence of a 14-3-3 homologues domain (amino acids 3 to 242). Based on publicly available EST data, the mRNA encoding 14-3-3theta is expressed in various tissues including lung, liver, spleen, embryo, colon and brain.

FHOS interacts with mSPNB2.

[0264] A bait comprising amino acids 840 to 954 (of 1164 total amino acids) of FHOS selected a single clone from a mouse embryo activation domain library comprising the polypeptide sequence of SEQ ID NO: 131, which corresponds with the highest homology to amino acids 825 to 1032 (of 2154 total amino acids) of mSPNB2. The interacting fragments of the bait and prey should contain the minimal binding domain of each protein. Since the bait fragment of FHOS comprises amino acids 840 to 954, the sequence having a truncation of up to 839 amino acids at the N-terminus and/or 210 (which is obtained by subtracting 954 from 1164, the total amino acids number of FHOS) amino acids at the C-terminus of the FHOS sequence set forth in FIG. 1 does not render it unable to interact with mSPNB2. Likewise, since the fragment of mSPNB2 comprises amino acids 825 to 1032, the sequence having a truncation of up to 824 amino acids at N-terminus and/or up to 1122 (which is obtained by subtracting 1032 from 2154, the total amino acids number of mSPNB2) amino acids at the C-terminus of the mSPNB2 sequence set forth in FIG. 70 does not render it unable to interact with FHOS.

[0265] mSPNB2, also known as elf1, elf3, Spnb-2, spectrin G, beta fodrin and 993003C03Rik, is the spectrin beta 2 and the mouse ortholog of human spectrin beta, non-erythrocytic I (SPTBN1, GenBank accession number NM_{—}003128). This protein belongs to a family of actin-crosslinking proteins. Deficiency of this protein results in mislocalization of Smad3 and Smad4 and loss of TGF-beta-dependent transcriptional response (Tang el al., 2003 Science 299, 574-577). Structural analysis of mSPNB2 predicts the presence of 2 calponin homology domains (amino acids 43 to 143 and 162 to 260) and 17 spectrin repeats between amino acids 292 and 2114. Based on publicly available EST data, the mRNA encoding mSPNB2 is expressed in various tissues including heart, spleen, thymus, kidney, liver, lung and brain.

FHOS interacts with BC020494(124).

[0266] A bait comprising amino acids 840 to 954 (of 1164 total amino acids) of FHOS selected a single clone from an adipose activation domain library comprising the polypeptide sequence of SEQ ID NO: 132, which corresponds with the highest homology to amino acids 1 to 124 (of 124 total amino acids) of BC020494(124). The interacting fragments of the bait and prey should contain the minimal binding domain of each protein. Since the bait fragment of FHOS comprises amino acids 840 to 954, the sequence having a truncation of up to 839 amino acids at the N-terminus and/or 210 (which is obtained by subtracting 954 from 1164, the total amino acids number of FHOS) amino acids at the C-terminus of the FHOS sequence set forth in FIG. 1 does not render it unable to interact with BC020494(124).

[0267] The cDNA encoding BC020494(124) set forth in FIG. 71 includes predicted 5′ UTR of BC020494 (GenBank accession number BC020494), and thus encodes 25 amino acids at the N-terminus not predicted to be present in the native protein.

[0268] BC020494 is a human hypothetical protein with unknown function, identified as clone MGC:10120 IMAGE:3900723. Structural analysis of BC020494(124) predicts the presence of a coiled coil domain (amino acids 93 to 109). Based on publicly available EST data, the mRNA encoding BC020494 is expressed in various tissues including brain, lung, skin and uterus. FHOS interacts with MACF1.

[0269] A bait comprising amino acids 840 to 954 (of 1164 total amino acids) of FHOS selected 6 identical clones from an adipose activation domain library comprising the polypeptide sequence of SEQ ID NO: 133, which corresponds with the highest homology to amino acids 3984 to 4240 (of 5430 total amino acids) of MACF1. The interacting fragments of the bait and prey should contain the minimal binding domain of each protein. Since the bait fragment of FHOS comprises amino acids 840 to 954, the sequence having a truncation of up to 839 amino acids at the N-terminus and/or 210 (which is obtained by subtracting 954 from 1164, the total amino acids number of FHOS) amino acids at the C-terminus of the FHOS sequence set forth in FIG. 1 does not render it unable to interact with MACF1. Likewise, since the fragment of MACF1 comprises amino acids 3984 to 4240, the sequence having a truncation of up to 3983 amino acids at N-terminus and/or up to 1190 (which is obtained by subtracting 4240 from 5430, the total amino acids number of MACF1) amino acids at the C-terminus of the MACF1 sequence set forth in FIG. 72 does not render it unable to interact with FHOS.

[0270] MACF1, also known as ACF7, ABP620, KIAA0465 and KIAA1251, is the microtubule-actin crosslinking factor 1. MACF1 belongs to the plakin family of cytoskeletal linker proteins and is one of the largest size proteins identified in human cytoskeletal proteins. This protein may function in microtubule dynamics to facilitate actin-microtubule interactions. Structural analysis of MACF1 predicts the presence of 2 CH domains (amino acids 80 to 179 and 196 to 293), 36 spectrin repeats between amino acids 582 and 5053, a coiled coil domain (amino acids 1013 to 1069), 2 EF-hand, calcium binding motifs (amino acids 5087 to 5115 and 5123 to 5151) and a GAS2 (growth-arrest-specific protein 2) domain (amino acids 5162 to 5234). Based on publicly available EST data, the mRNA encoding MACF1 is expressed in various tissues including spinal cord, skeletal muscle, liver, lung and heart. FHOS interacts with MYH1.

[0271] A bait comprising amino acids 840 to 954 (of 1164 total amino acids) of FHOS selected a single clone from a skeletal muscle activation domain library comprising the polypeptide sequence of SEQ ID NO: 134, which corresponds with the highest homology to amino acids 1560 to 1700 (of 1939 total amino acids) of MYH1. The interacting fragments of the bait and prey should contain the minimal binding domain of each protein. Since the bait fragment of FHOS comprises amino acids 840 to 954, the sequence having a truncation of up to 839 amino acids at the N-terminus and/or 210 (which is obtained by subtracting 954 from 1164, the total amino acids number of FHOS) amino acids at the C-terminus of the FHOS sequence set forth in FIG. 1 does not render it unable to interact with MYH1. Likewise, since the fragment of MYH1 comprises amino acids 1560 to 1700, the sequence having a truncation of up to 1559 amino acids at N-terminus and/or up to 239 (which is obtained by subtracting 1700 from 1939, the total amino acids number of MYH1) amino acids at the C-terminus of the MYH1 sequence set forth in FIG. 152 does not render it unable to interact with FHOS.

[0272] MYH1, also known as MYHa, MYHSAI and MyHC-2X/D, is the isoform 1 of myosin heavy chain. This protein may provide force for muscle contraction, cytokinesis and phagocytosis. Structural analysis of MYH1 predicts the presence of a myosin N-terminal SH3-like domain (amino acids 35 to 78), a myosin (large ATPases) domain (amino acids 80 to 783), an IQ (short calmodulin-binding motif containing conserved lie and Gin residues) domain (amino acids 784 to 806) and myosin tail (amino acids 1072 to 1931). Based on publicly available EST data, the mRNA encoding MYH1 is expressed in skeletal muscle and spinal cord. FHOS interacts with mPPGB.

[0273] A bait comprising amino acids 951 to 1164 (of 1164 total amino acids) of FHOS selected a single clone from a mouse embryo activation domain library comprising the polypeptide sequence of SEQ ID NO: 135, which corresponds with the highest homology to amino acids 32 to 207 (of 474 total amino acids) of mPPGB. The interacting fragments of the bait and prey should contain the minimal binding domain of each protein. Since the bait fragment of FHOS comprises amino acids 951 to 1164, the sequence having a truncation of up to 950 amino acids at the N-terminus of the FHOS sequence set forth in FIG. 1 does not render it unable to interact with mPPGB. Likewise, since the fragment of mPPGB comprises amino acids 32 to 207, the sequence having a truncation of up to 31 amino acids at N-terminus and/or up to 267 (which is obtained by subtracting 207 from 474, the total amino acids number of mPPGB) amino acids at the C-terminus of the mPPGB sequence set forth in FIG. 74 does not render it unable to interact with FHOS. mPPGB, also known as PPCA, is the protective protein for beta-galactosidase and the mouse ortholog of human PPGB (Genbank accession number NM_{—}000308). PPGB is a glycoprotein which associates with lysosomal enzymes beta-galactosidase and neuraminidase to form a high molecular weight complex. The formation of this complex provides a protective role for stability and activity. Deficiencies of this gene are linked to galactosialidosis. Structural analysis of mPPGB predicts the presence of a signal peptide at N-terminus amino acids 1 to 19, serine carboxypeptidase (amino acids 34 to 471). Based on publicly available EST data, the mRNA encoding mPPGB is expressed in various tissues including kidney, thymus, liver, testis, placenta and brain.

FHOS interacts with mZYX.

[0274] A bait comprising amino acids 951 to 1164 (of 1164 total amino acids) of FHOS selected 2 identical clones from a mouse embryo activation domain library comprising the polypeptide sequence of SEQ ID NO: 136, which corresponds with the highest homology to amino acids 230 to 506 (of 564 total amino acids) of mZYX. The interacting fragments of the bait and prey should contain the minimal binding domain of each protein. Since the bait fragment of FHOS comprises amino acids 951 to 1164, the sequence having a truncation of up to 950 amino acids at the N-terminus of the FHOS sequence set forth in FIG. 1 does not render it unable to interact with mZYX. Likewise, since the fragment of mZYX comprises amino acids 230 to 506, the sequence having a truncation of up to 229 amino acids at N-terminus and/or up to 58 (which is obtained by subtracting 506 from 564, the total amino acids number of mZYX) amino acids at the C-terminus of the mZYX sequence set forth in FIG. 75 does not render it unable to interact with FHOS.

[0275] mZYX is the mouse ortholog of human zyxin (ZYX, GenBank accession number NM_{—}003461). Zyxin is a member of the LIM protein family and contains a proline-rich region which is likely to interact with SH3 domains that are linked to signal transduction pathways. Zyx knockout mice were viable and fertile and displayed no obvious histologic abnormalities in any of the organs examined (Hoffman et al., 2003 Molec. Cell Biol. 23, 70-79). Structural analysis of mZYX predicts the presence of 3 LIM (zinc-binding domain present in Lin- 11, Isl- 1, Mec-3) domains (amino acids 375 to 428, 435 to 487 and 495 to 557). Based on publicly available EST data, the mRNA encoding mZYX is expressed in various tissues including lung, thymus, spleen, liver, embryo and brain.

FHOS interacts with mPRKCABP.

[0276] A bait comprising amino acids 1001 to 1164 (of 1164 total amino acids) of FHOS selected 3 identical clones from a mouse embryo activation domain library comprising the polypeptide sequence of SEQ ID NO: 137, which corresponds with the highest homology to amino acids 1 to 382 (of 416 total amino acids) of mPRKCABP. The interacting fragments of the bait and prey should contain the minimal binding domain of each protein. Since the bait fragment of FHOS comprises amino acids 1001 to 1164, the sequence having a truncation of up to 1000 amino acids at the N-terminus of the FHOS sequence set forth in FIG. 1 does not render it unable to interact with mPRKCABP. Likewise, since the fragment of mPRKCABP comprises amino acids 1 to 382, the sequence having a truncation of up to 34 (which is obtained by subtracting 382 from 416, the total amino acids number of mPRKCABP) amino acids at the C-terminus of the mPRKCABP sequence set forth in FIG. 76 does not render it unable to interact with FHOS.

[0277] mPRKCABP, also known as Pick 1, was originally isolated from a mouse cDNA library using a yeast 2-hybrid screening with the catalytic domain of the alpha isoform of activated protein kinase C as a bait. This protein is strongly similar to the human PRKCABP (GenBank accession number NM_{—}012407). The extreme C-terminal 3 amino acids of metabotropic glutamate receptor-7 (mGluR7) interacts with the PDZ domain of mPRKCABP, suggesting a role for mPRKCABP as a scaffolding molecule at presynaptic sites (Boudin et al., 2000 Neuron 28, 485-497). Structural analysis of mPRKCABP predicts the presence of a PDZ domain (amino acids 31 to 105). Based on publicly available EST data, the mRNA encoding mPRKCABP is expressed in various tissues including testis, kidney, placenta, lung and fetal brain.

FHOS interacts with mMYLK.

[0278] A bait comprising amino acids 1001 to 1164 (of 1164 total amino acids) of FHOS selected a single clone from a mouse embryo activation domain library comprising the polypeptide sequence of SEQ ID NO: 138, which corresponds with the highest homology to amino acids 568 to 897 (of 1561 total amino acids) of mMYLK. The interacting fragments of the bait and prey should contain the minimal binding domain of each protein. Since the bait fragment of FHOS comprises amino acids 1001 to 1164, the sequence having a truncation of up to 1000 amino acids at the N-terminus of the FHOS sequence set forth in FIG. 1 does not render it unable to interact with mMYLK. Likewise, since the prey fragment of mMYLK comprises amino acids 568 to 897, the sequence having a truncation of up to 567 amino acids at N-terminus and/or up to 664 (which is obtained by subtracting 897 from 1561, the total amino acids number of mMYLK) amino acids at the C-terminus of the mMYLK sequence set forth in FIG. 156 does not render it unable to interact with FHOS. mMYLK is the mouse ortholog of the human myosin light polypeptide kinase, also known as KRP, MLCK, MLCK108, MLCK210 and FLJ12216 (GenBank accession number NM_{—}053029). MYLK phosphorylates myosin regulatory light chains in a calcium/calmodulin dependent manner. Structural analysis of mMYLK predicts the presence of 7 IGc2 (immunoglobulin C-2 type) domains between amino acids 45 and 1199, an immunoglobulin like domain (amino acids 1272 to 1350) and a fibronectin type 3 domain (amino acids 1353 to 1435). Based on publicly available EST data, the mRNA encoding MYLK is expressed in various tissues including placenta, prostate, liver, lung and skeletal muscle.

2.2. Protein Complexes

[0279] Accordingly, the present invention provides protein complexes formed between FHOS and one or more FHOS-interacting proteins selected from the group consisting of GROUP1. The present invention also provides a protein complex formed from the interaction between a homologue, derivative or fragment of FHOS and one or more of the FHOS-interacting proteins in accordance with the present invention. In addition, the present invention further encompasses a protein complex having FHOS and a homologue, derivative or fragment of one or more of the FHOS-interacting proteins in accordance with the present invention. In yet another embodiment, a protein complex is provided having a homologue, derivative or fragment of FHOS and a homologue, derivative or fragment of one or more of the FHOS-interacting proteins in accordance with the present invention. In other words, one or more of the interacting protein members of a protein complex of the present invention may be a native protein or a homologue, derivative or fragment of a native protein.

[0280] As described above, individual protein domains involved in the specific protein-protein interactions have been discovered and summarized in Table 1. Accordingly, protein fragments consisting of the amino acid sequence of the identified interaction domains or homologues or derivatives thereof can be used in forming the protein complexes of the present invention. In addition, as will be apparent to a skilled artisan, a hybrid protein containing such an interaction domain may also be used as an interacting partner in the protein complex of the present invention.

[0281] As used herein, the term “homologue” means a polypeptide that exhibits an amino acid sequence homology and/or structural resemblance to one of the above interacting native proteins, preferably native human proteins, or to one of the interaction domains of the native proteins such that it is capable of interacting with an interacting partner of the native protein or a homologue thereof, either in the presence or absence of a compound capable of modulating the interaction between the polypeptide and the interacting partner of the native protein or the homologue thereof. For example, a protein homologue may have an amino acid sequence that is at least 50%, preferably at least 75%, more preferably at least 85%, even more preferably at least 90%, and most preferably 95% identical to one of the above native interacting proteins or an interaction domain thereof. Homologues may be the counterpart proteins of other species including animals, plants, yeast, bacteria, and the like. Homologues may also be selected by, e.g., mutagenesis in FHOS and its interacting partners. Homologues may be identified by site-specific mutagenesis in combination with assay systems for detecting protein-protein interactions, e.g., the yeast two-hybrid system described below.

[0282] Homology as used herein may refer to its precise meaning in biology of having a common evolutionary origin (such as mouse and human FHOS proteins) and/or to structural resemblances. Structural resemblance is expressed in terms of identity or similarities. Identity or similarity as known in the art, is a relationship between two or more polypeptide sequences (or two or more polynucleotide sequences, as the case may be) as determined by comparing the sequences. Identity also means the degree of sequence relatedness between polypeptide sequences or polynucleotide sequences, as determined by the match between strings of such sequences from the amino end to the carboxyl end or 5′ to 3′ end for polynucleotides. “Identity” can be readily calculated by art known methods. See e.g., Altschul et al., Nucleic Acids Res., 25:3389-3402 (1997). Thus, homologues in the present invention include isolated polypeptides or polynucleotides having at least a 50,60, 70, 80, 85, 90, 95, 96, 97, 98, 99 or 100% identity to a specific polypeptide or polynucleotide sequence disclosed (also referred to herein as a reference sequence, i.e., the sequence having a SEQ ID NO that is disclosed herein) in this application.

[0283] The expression of “% identity” as used herein can be understood by considering the following description: A polypeptide sequence of the present invention may be identical to the reference sequence (i.e., the sequence having a SEQ ID NO that is disclosed herein) in that it may be 100% identical, or it may include up to a certain number of amino acid alterations as compared to the reference sequence such that the percent identity is less than 100% identity. Such alterations (also referred to as mutations or point mutations) are at least one amino acid deletion, substitution (conservative and/or non-conservative substitution) or insertion. For example, by a polypeptide sequence having at least 90% identity to a reference polypeptide sequence of SEQ ID NO: 1 (which is a bait polypeptide sequence disclosed in this application), it is meant that the polypeptide sequence is identical to the reference sequence except that the polypeptide sequence may include up to 10 mutations per 100 amino acids of the reference sequence of SEQ ID NO: 1. Similarly, if a polypeptide has at least 91% identity or 92% or 93% or 95% or 96% or 97% or 98% or 99% to a reference sequence, then the polypeptide has up to 9 or 8 or 7 or 5 or 4 or 3 or 2 or 1 amino acid alterations, respectively, per 100 amino acids of the reference sequence.

[0284] The alterations may occur at the NH₂— or COOH-terminal positions of the reference sequence or anywhere between those terminal positions, interspersed either individually among the amino acids in the reference sequence or in one or more contiguous groups within the reference sequence. In the case of polynucleotides, the alterations may occur at the 5′ or 3′-terminal positions of the reference sequence or anywhere between those terminal positions, interspersed either individually among the nucleotides in the reference polynucleotide sequence or in one or more contiguous groups within the reference sequence.

[0285] The number of amino acid alterations (As) for a given % identity is determined by first multiplying (x) the total number of amino acids (Tₐ) in the reference sequence by a number (n) which is obtained by dividing the percent identity by 100 (for example 0.80 for 80%, 0.90 for 90% 0.92 for 92%, 0.95 for 95%, 0.97 for 97% and so on) and then subtracting that product from said total number of amino acids (Tₐ) in the reference sequence. After this calculation, any non-integer value may be rounded off to the nearest integer to obtain the approximate number with out decimal values. For purposes of clarity, only the first decimal number is rounded off, to approximate the number of amino acid alterations to an integer to obtain a polypeptide of a given % identity. If the first decimal number is 5 or greater than 5, then the number preceding the decimal point is increased by “one” and all the decimal numbers are dropped (rounded up). If the first decimal number is less than 5, then the number preceding the decimal point is unchanged and all the decimal numbers are dropped (rounded down). The calculation is summarized in the following formula:
Aₐ≅Tₐ−(Tₐ×n)

[0286] For example, the number of amino acid alterations needed to obtain a polypeptide that is at least 95% identical to the reference sequence of SEQ ID NO: 1 is determined by first multiplying 150 (the total number of amino acids in the reference sequence) by 0.95 (which is obtained by dividing 95 by 100), and then subtracting that product from 150 (the total number of amino acids in the reference sequence), i.e., 150×0.95=142.5 and then 150−142.5=7.5. After this calculation, the value of 7.5 is rounded up to 8, i.e., up to 8 amino acid alterations are needed over the entire length of the 150 amino acids of SEQ ID NO: 1 to obtain a polypeptide that is at least 95% identical to the reference sequence of SEQ ID NO: 1.

[0287] Although the above description is provided only with reference to polypeptides and certain percent identities, it should be noted that calculations for polynucleotides and other percent identities can be made by following that exemplary description.

[0288] The term “derivative” refers to a derivative or modified form of a protein. Examples of modified forms include glycosylated forms, phosphorylated forms, myristylated forms, ribosylated forms, and the like. Derivatives also include hybrid or fusion proteins containing one of the above native interacting proteins or a homologue or fragment thereof. In addition, derivatives also encompass artificial proteins having substituted non-naturally occurring amino acids, e.g., D-amino acids.

[0289] A fragment of a polypeptide according to the present invention is also a variant polypeptide having an amino acid sequence that is entirely the same as part but not all of any amino acid sequence of any specific polypeptide disclosed herein.

[0290] Preferred fragments include, for example, truncated polypeptides having a portion of an amino acid sequence of SEQ ID NOs: 147, 51-110, 115-156. Further preferred are fragments characterized by structural or functional attributes such as fragments having alpha-helix and alpha-helix forming regions, beta-sheet and beta-sheet forming regions, beta-turn and beta-turn forming regions, coiled-coil and coiled-coil forming regions and other known in the art.

[0291] Particularly preferred fragments include an isolated polypeptide comprising an amino acid sequence having 1 or more or at least 15, 20, 30, 40, 50, 100, 150, 200, 300, 400, 500, 600, 700, 800, 900 or 1000 contiguous amino acids truncated or deleted from the either amino- or carboxy-terminus of the amino acid sequences of SEQ ID NO: 1-47, 51-110, 115-156 disclosed herein. Preferred are fragments are those fragments that mediate activities of or retain properties for protein interactions including those with a similar activity/property or an improved activity/property, or with a decreased undesirable activity or property.

[0292] In a specific embodiment of the protein complex of the present invention, two or more interacting partners (FHOS and one or more proteins selected from the group consisting of GROUP1, or homologue, derivative or fragment thereof) are directly fused together, or covalently linked together through a peptide linker, forming a hybrid protein having a single unbranched polypeptide chain. Thus, the protein complex may be formed by “intramolecular” interactions between two portions of the hybrid protein. Again, one or both of the fused or linked interacting partners in this protein complex may be a native protein or a homologue, derivative or fragment of a native protein.

[0293] A variant polypeptide is a polypeptide that differs from a reference polypeptide but retains its essential properties (e.g., retains ability to interact with other protein(s) of the present protein-protein interaction).

[0294] By way of example, a variant of FHOS can have a sequence consisting of the amino acids identical to that set forth in SEQ ID NO: 27 (a reference polypeptide in this case) except that, over the entire length corresponding to the amino acid sequence of SEQ ID NO: 27, the amino acid sequence of the variant can have one or more conservative amino acid substitutions, whereby an amino acid residue is replaced by another with like properties. Typical conservative amino acid substitutions are among Ala, Val, Leu and lie; among Thr and Ser; among the acidic residues Glu and Asp; among Asn and Gln; and among basic residues Lys and Arg; or aromatic residues Phe and Tyr. A variant of FHOS can also have a sequence consisting of the amino acids identical to that set forth in SEQ ID NO: 27, the reference polypeptide, except that, over the entire length corresponding to the amino acid sequence of SEQ ID NO: 27, the amino acid sequence of the variant can have one or more non-conservative amino acid substitutions, deletions or insertions at such positions of the amino acid sequence which do not alter its essential properties, such as for example, its interacting ability or activity with other polypeptides. A variant and reference polypeptides may differ in amino acid sequence by one or more substitutions, additions, deletions in any combination. Substitutions, additions, deletions are also sometimes referred to as mutations. Generally, differences are limited so that the sequences of the reference polypeptide and the variant are closely similar overall and, in many regions, identical. Particularly preferred are variants in which 5-10, 1-5, 1-4, 1-3, 1-2 or 1 amino acids are substituted, deleted or added in any combination for every 100 amino acids. A variant may be induced or naturally occurring such as an allelic variant. Variants may be created by mutagenesis or by direct synthesis or other methods known to skilled workers in this art.

[0295] The protein complexes of the present invention can also be in a modified form. For example, an antibody selectively immunoreactive with the protein complex can be bound to the protein complex. In another example, a non-antibody modulator capable of enhancing the interaction between the interacting partners in the protein complex may be included. Alternatively, the protein members in the protein complex may be cross-linked for purposes of stabilization. Various crosslinking methods may be used. For example, a bifunctional reagent in the form of R-S-S-R′ may be used in which the R and R′ groups can react with certain amino acid side chains in the protein complex forming covalent linkages. See e.g., Traut et al., in Creighton ed., Protein Function: A Practical Approach, IRL Press, Oxford, 1989; Baird et al., J. Biol. Chem., 251:6953-6962 (1976). Other useful crosslinking agents include, e.g., Denny-Jaffee reagent, a heterbiofunctional photoactivable moiety cleavable through an azo linkage (See Denny et al., Proc. Natl. Acad. Sci. U.S.A, 81:5286-5290 (1984)), and ¹²⁵I-{5-[N-(3-iodo-4-azidosalicyl)cysteaminyl]-2-thiopyridine}, a cysteine-specific photocrosslinking reagent (see Chen et al., Science, 265:90-92 (1994)).

[0296] The above-described protein complexes may further include any additional components, e.g., other proteins, nucleic acids, lipid molecules, monosaccharides or polysaccharides, ions, etc.

2.3. Methods of Preparing Protein Complexes

[0297] The protein complex of the present invention can be prepared by a variety of methods. Specifically, a protein complex can be isolated directly from an animal tissue sample, preferably a human tissue sample containing the protein complex. Alternatively, a protein complex can be purified from host cells that recombinantly express the members of the protein complex. As will be apparent to a skilled artisan, a protein complex can be prepared from a tissue sample or recombinant host cell by coimmunoprecipitation using an antibody immunoreactive with an interacting protein partner, or preferably an antibody selectively immunoreactive with the protein complex as will be discussed in detail below.

[0298] The antibodies can be monoclonal or polyclonal. Coimmunoprecipitation is a commonly used method in the art for isolating or detecting bound proteins. In this procedure, generally a serum sample or tissue or cell lysate is admixed with a suitable antibody. The protein complex bound to the antibody is precipitated and washed. The bound protein complexes are then eluted.

[0299] Alternatively, immunoaffinity chromatography and immunobloting techniques may also be used in isolating the protein complexes from native tissue samples or recombinant host cells using an antibody immunoreactive with an interacting protein partner, or preferably an antibody selectively immunoreactive with the protein complex. For example, in protein immunoaffinity chromatography, the antibody may be covalently or non-covalently coupled to a matrix such as Sepharose in, e.g., a column. The tissue sample or cell lysate from the recombinant cells can then be contacted with the antibody on the matrix. The column is then washed with a low-salt solution to wash off the unbound components. The protein complexes that are retained in the column can be then eluted from the column using a high-salt solution, a competitive antigen of the antibody, a chaotropic solvent, or sodium dodecyl sulfate (SDS), or the like. In immunoblotting, crude proteins samples from a tissue sample or recombinant host cell lysate can be fractionated on a polyacrylamide gel electrophoresis (PAGE) and then transferred to, e.g., a nitrocellulose membrane. The location of the protein complex on the membrane may be identified using a specific antibody, and the protein complex is subsequently isolated.

[0300] In another embodiment, individual interacting protein partners may be isolated or purified independently from tissue samples or recombinant host cells using similar methods as described above. The individual interacting protein partners are then contacted with each other under conditions conducive to the interaction therebetween thus forming a protein complex of the present invention. It is noted that different protein-protein interactions may require different conditions. As a starting point, for example, a buffer having 20 mM Tris-HCl, pH 7.0 and 500 mM NaCl may be used. Several different parameters may be varied, including temperature, pH, salt concentration, reducing agent, and the like. Some minor degree of experimentation may be required to determine the optimum incubation condition, this being well within the capability of one skilled in the art once apprised of the present disclosure.

[0301] In yet another embodiment, the protein complex of the present invention may be prepared from tissue samples or recombinant host cells or other suitable sources by protein affinity chromatography or affinity blotting. That is, one of the interacting protein partners is used to isolate the other interacting protein partner(s) by binding affinity thus forming protein complexes. Thus, an interacting protein partner prepared by purification from tissue samples or by recombinant expression or chemical synthesis may be bound covalently or non-covalently to a matrix such as Sepharose in, e.g., a chromatography column. The tissue sample or cell lysate from the recombinant cells can then be contacted with the bound protein on the matrix. A low-salt solution is used to wash off the unbound components, and a high-salt solution is then employed to elute the bound protein complexes in the column. In affinity blotting, crude protein samples from a tissue sample or recombinant host cell lysate can be fractionated on a polyacrylamide gel electrophoresis (PAGE) and then transferred to, e.g., a nitrocellulose membrane. The purified interacting protein member is then bound to its interacting protein partner(s) on the membrane forming protein complexes, which are then isolated from the membrane.

[0302] It will be apparent to skilled artisans that any recombinant expression methods may be used in the present invention for purposes of recombinantly expressing the protein complexes or individual interacting proteins. Generally, a nucleic acid encoding an interacting protein member can be introduced into a suitable host cell. For purposes of recombinantly forming a protein complex within a host cell, nucleic acids encoding two or more interacting protein members should be introduced into the host cell.

[0303] Typically, the nucleic acids, preferably in the form of DNA, are incorporated into a vector to form expression vectors capable of expressing the interacting protein member(s) once introduced into a host cell. Many types of vectors can be used for the present invention. Methods for the construction of an expression vector for purposes of this invention should be apparent to skilled artisans apprised of the present disclosure. See generally, Current Protocols in Molecular Biology, Vol. 2, Ed. Ausubel, et al., Greene Publish. Assoc. & Wiley Interscience, Ch. 13, 1988; Glover, DNA Cloning, Vol. 11, IRL Press, Wash., D.C., Ch. 3, 1986; Bitter, et al., in Methods in Enzymology 153:516-544 (1987); The Molecular Biology of the Yeast Saccharomyces, Eds. Strathern et al., Cold Spring Harbor Press, Vols. I and II, 1982; and Sambrook et al., Molecular Cloning: A Laboratory Manual, Cold Spring Harbor Press, 1989.

[0304] Generally, the expression vectors may include a promoter operably linked to a DNA encoding an interacting protein member, an origin of DNA replication for the replication of the vectors in host cells. Preferably, the expression vectors also include a replication origin for the amplification of the vectors in, e.g., E. coli, and selection marker(s) for selecting and maintaining only those host cells harboring the expression vectors. Additionally, the expression vectors preferably also contain inducible elements, which function to control the transcription from the DNA encoding an interacting protein member. Other regulatory sequences such as transcriptional enhancer sequences and translation regulation sequences (e.g., Shine-Dalgarno sequence) can also be operably included. Termination sequences such as the polyadenylation signals from bovine growth hormone, SV40, lacZ and AcMNPV polyhedral protein genes may also be operably linked to the DNA encoding an interacting protein member. An epitope tag coding sequence for detection and/or purification of the expressed protein can also be operably incorporated into the expression vectors. Examples of useful epitope tags include, but are not limited to, influenza virus hemagglutinin (HA), Simian Virus 5 (V5), polyhistidine (6xHis), c-myc, lacZ, GST, and the like. Proteins with polyhistidine tags can be easily detected and/or purified with Ni affinity columns, while specific antibodies immunoreactive with many epitope tags are generally commercially available. The expression vectors may also contain components that direct the expressed protein extracellularly or to a particular intracellular compartment. Signal peptides, nuclear localization sequences, endoplasmic reticulum retention signals, mitochondrial localization sequences, myristoylation signals, palmitoylation signals, and transmembrane sequences are example of optional vector components that can determine the destination of expressed proteins. When it is desirable to express two or more interacting protein members in a single host cell, the DNA fragments encoding the interacting protein members may be incorporated into a single vector or different vectors.

[0305] The thus constructed expression vectors can be introduced into the host cells by any techniques known in the art, e.g., by direct DNA transformation, microinjection, electroporation, viral infection, lipofection, gene gun, and the like. The expression of the interacting protein members may be transient or stable. The expression vectors can be maintained in host cells in an extrachromosomal state, i.e., as self-replicating plasmids or viruses. Alternatively, the expression vectors can be integrated into chromosomes of the host cells by conventional techniques such as selection of stable cell lines or site-specific recombination. The vector construct can be designed to be suitable for expression in various host cells, including but not limited to bacteria, yeast cells, plant cells, insect cells, and mammalian and human cells. Methods for preparing expression vectors for expression in different host cells should be apparent to a skilled artisan.

[0306] Homologues and fragments of the native interacting protein members can also be easily expressed using the recombinant methods described above. For example, to express a protein fragment, the DNA fragment incorporated into the expression vector can be selected such that it only encodes the protein fragment. Likewise, a specific hybrid protein can be expressed using a recombinant DNA encoding the hybrid protein. Similarly, a homologue protein may be expressed from a DNA sequence encoding the homologue protein. A homologue-encoding DNA sequence may be obtained by manipulating the native protein-encoding sequence using recombinant DNA techniques. For this purpose, random or site-directed mutagenesis can be conducted using techniques generally known in the art. To make protein derivatives, for example, the amino acid sequence of a native interacting protein member may be changed in predetermined manners by site-directed DNA mutagenesis to create or remove consensus sequences for, e g., phosphorylation by protein kinases, glycosylation, ribosylation, myristoylation, palmytoylation, and the like. Alternatively, non-natural amino acids can be incorporated into an interacting protein member during the synthesis of the protein in recombinant host cells. For example, photoreactive lysine derivatives can be incorporated into an interacting protein member during translation by using a modified lysyl-tRNA. See, e.g., Wiedmann et al., Nature, 328:830-833 (1989); Musch et al., Cell, 69:343-352 (1992). Other photoreactive amino acid derivatives can also be incorporated in a similar manner. See, e.g., High et al., J. Biol. Chem., 368:28745-28751 (1993). Indeed, the photoreactive amino acid derivatives thus incorporated into an interacting protein member can function to cross-link the protein to its interacting protein partner in a protein complex under predetermined conditions.

[0307] In addition, derivatives of the native interacting protein members of the present invention can also be prepared by chemically linking certain moieties to amino acid side chains of the native proteins.

[0308] If desired, the homologues and derivatives thus generated can be tested to determine whether they are capable of interacting with their intended interacting partners to form protein complexes. Testing can be conducted by e.g., the yeast two-hybrid system or other methods known in the art for detecting protein-protein interaction.

[0309] A hybrid protein as described above having FHOS or a homologue, derivative, or fragment thereof covalently linked by a peptide bond or a peptide linker to a protein selected from the group consisting of GROUP1 or a homologue, derivative, or fragment thereof, can be expressed recombinantly from a chimeric nucleic acid, e.g., a DNA or mRNA fragment encoding the fusion protein. Accordingly, the present invention also provides a nucleic acid encoding the hybrid protein of the present invention. In addition, an expression vector having incorporated therein a nucleic acid encoding the hybrid protein of the present invention is also provided. The methods for making such chimeric nucleic acids and expression vectors containing them should be apparent to skilled artisans apprised of the present disclosure.

2.4. Protein Microchip

[0310] In accordance with another embodiment of the present invention, a protein microchip or microarray is provided having one or more of the protein complexes of the present invention. Protein microarrays are becoming increasingly important in both proteomics research and protein-based detection and diagnosis of diseases. The protein microarrays in accordance with this embodiment of the present invention will be useful in a variety of applications including, e.g., large-scale or high-throughput screening for compounds capable of binding to the protein complexes or modulating the interactions between the interacting protein members in the protein complexes.

[0311] The protein microarray of the present invention can be prepared in a number of methods known in the art. An example of a suitable method is that disclosed in MacBeath and Schreiber, Science, 289:1760-1763 (2000). Essentially, glass microscope slides are treated with an aldehyde-containing silane reagent (SuperAldehyde Substrates purchased from TeleChem International, Cupertino, Calif.). Nanoliter volumes of protein samples in a phosphate-buffered saline with 40% glycerol are then spotted onto the treated slides using a high-precision contact-printing robot. After incubation, the slides are immersed in a bovine serum albumin (BSA)-containing buffer to quench the unreacted aldehydes and to form a BSA layer which functions to prevent non-specific protein binding in subsequent applications of the microchip. Alternatively, as disclosed in MacBeath and Schreiber, proteins or protein complexes of the present invention can be attached to a BSA-NHS slide by covalent linkages. BSA-NHS slides are fabricated by first attaching a molecular layer of BSA to the surface of glass slides and then activating the BSA with N,N′-disuccinimidyl carbonate. As a result, the amino groups of the lysine, aspartate, and glutamate residues on the BSA are activated and can form covalent urea or amide linkages with protein samples spotted on the slides. See MacBeath and Schreiber, Science, 289:1760-1763 (2000).

[0312] Another example of useful method for preparing the protein microchip of the present invention is that disclosed in PCT Publication Nos. WO 00/4389A2 and WO 00/04382, both of which are assigned to Zyomyx and are incorporated herein by reference. First, a substrate or chip base is covered with one or more layers of thin organic film to eliminate any surface defects, insulate proteins from the base materials, and to ensure uniform protein array. Next, a plurality of protein-capturing agents (e.g., antibodies, peptides, etc.) are arrayed and attached to the base that is covered with the thin film. Proteins or protein complexes can then be bound to the capturing agents forming a protein microarray. The protein microchips are kept in flow chambers with an aqueous solution.

[0313] The protein microarray of the present invention can also be made by the method disclosed in PCT Publication No. WO 99/36576 assigned to Packard Bioscience Company, which is incorporated herein by reference. For example, a three-dimensional hydrophilic polymer matrix, i.e., a gel, is first disposed on a solid substrate such as a glass slide. The polymer matrix gel is capable of expanding or contracting and contains a coupling reagent that reacts with amine groups. Thus, proteins and protein complexes can be contacted with the matrix gel in an expanded aqueous and porous state to allow reactions between the amine groups on the protein or protein complexes with the coupling reagents thus immobilizing the proteins and protein complexes on the substrate. Thereafter, the gel is contracted to embed the attached proteins and protein complexes in the matrix gel.

[0314] Alternatively, the proteins and protein complexes of the present invention can be incorporated into a commercially available protein microchip, e.g., the ProteinChip System from Ciphergen Biosystems Inc., Palo Alto, Calif. The ProteinChip System comprises metal chips having a treated surface, which interact with proteins. Basically, a metal chip surface is coated with a silicon dioxide film. The molecules of interest such as proteins and protein complexes can then be attached covalently to the chip surface via a silane coupling agent.

[0315] The protein microchips of the present invention can also be prepared with other methods known in the art, e.g., those disclosed in U.S. Pat. Nos. 6,087,102, 6,139,831, 6,087,103; PCT Publication Nos. WO 99/60156, WO 99/39210, WO 00/54046, WO 00/53625, WO 99/51773, WO 99/35289, WO 97/42507, WO 01/01142, WO 00/63694, WO 00/61806, WO 99/61148, WO 99/40434, all of which are incorporated herein by reference.

3. Antibodies

[0316] In accordance with another aspect of the present invention, an antibody immunoreactive against a protein complex of the present invention is provided. In one embodiment, the antibody is selectively immunoreactive with a protein complex of the present invention. Specifically, the phrase “selectively immunoreactive with a protein complex” as used herein means that the immunoreactivity of the antibody of the present invention with the protein complex is substantially higher than that with the individual interacting members of the protein complex so that the binding of the antibody to the protein complex is readily distinguishable from the binding of the antibody to the individual interacting member proteins based on the strength of the binding affinities. Preferably, the binding constant differs by a magnitude of at least 2 fold, more preferably at least 5 fold, even more preferably at least 10 fold, and most preferably at least 100 fold. In a specific embodiment, the antibody is not substantially immunoreactive with the interacting protein members of the protein complex.

[0317] The antibody of the present invention can be readily prepared using procedures generally known in the art. See, e.g., Harlow and Lane, Antibodies: A Laboratory Manual, Cold Spring Harbor Press, 1988. Typically, the protein complex against which the antibody to be generated will be immunoreactive is used as the antigen for the purpose of producing immune response in a host animal. In one embodiment, the protein complex used consists the native proteins. Preferably, the protein complex includes only the binding domains of FHOS and one or more proteins selected from the group consisting of GROUP1, respectively. As a result, a greater portion of the total antibodies may be selectively immunoreactive with the protein complexes. The binding domains can be selected from, e.g., those summarized in Table 1. In addition, various techniques known in the art for predicting epitopes may also be employed to design antigenic peptides based on the interacting protein members in a protein complex of the present invention to increase the possibility of producing an antibody selectively immunoreactive with the protein complex. Suitable epitope-prediction computer programs include, e.g., MacVector from International Biotechnologies, Inc. and Protean from DNAStar.

[0318] In a specific embodiment, a hybrid protein as described above in Section 2.1 is used as an antigen which has FHOS or a homologues, derivative, or fragment thereof covalently linked by a peptide bond or a peptide linker to a protein selected from the group consisting of GROUP I or a homologue, derivative, or fragment thereof. In a preferred embodiment, the hybrid protein consists of two interacting binding domains selected from Table 1, or homologues or derivatives thereof, covalently linked together by a peptide bond or a linker molecule.

[0319] The antibody of the present invention can be a polyclonal antibody to a protein complex of the present invention. To produce the polyclonal antibody, various animal hosts can be employed, including, e.g., mice, rats, rabbits, goats, guinea pigs, hamsters, etc. A suitable antigen which is a protein complex of the present invention or a derivative thereof as described above can be administered directly to a host animal to illicit immune reactions. Alternatively, it can be administered together with a carrier such as keyhole limpet hemocyanin (KLH), bovine serum albumin (BSA), ovalbumin, and Tetanus toxoid. Optionally, the antigen is conjugated to a carrier by a coupling agent such as carbodiimide, glutaraldehyde, and MBS. Any conventional adjuvants may be used to boost the immune response of the host animal to the protein complex antigen. Suitable adjuvants known in the art include but are not limited to Complete Freund's Adjuvant (which contains killed mycobacterial cells and mineral oil), incomplete Freund's Adjuvant (which lacks the cellular components), aluminum salts, MF59 from Biocine, monophospholipid, synthetic trehalose dicorynomycolate (TDM) and cell wall skeleton (CWS) both from RIBI ImmunoChem Research Inc., Hamilton, Mont., non-ionic surfactant vesicles (NISV) from Proteus International PLC, Cheshire, U.K., and saponins. The antigen preparation can be administered to a host animal by subcutaneous, intramuscular, intravenous, intradermal, or intraperitoneal injection, or by injection into a lymphoid organ.

[0320] The antibodies of the present invention may also be monoclonal. Such monoclonal antibodies may be developed using any conventional techniques known in the art. For example, the popular hybridoma method disclosed in Kohler and Milstein, Nature, 256:495-497 (1975) is now a well-developed technique that can be used in the present invention. See U.S. Pat. No.4,376,110, which is incorporated herein by reference. Essentially, B-lymphocytes producing a polyclonal antibody against a protein complex of the present invention can be fused with myeloma cells to generate a library of hybridoma clones. The hybridoma population is then screened for antigen binding specificity and also for immunoglobulin class (isotype). In this manner, pure hybridoma clones producing specific homogenous antibodies can be selected. See generally, Harlow and Lane, Antibodies: A Laboratory Manual, Cold Spring Harbor Press, 1988. Alternatively, other techniques known in the art may also be used to prepare monoclonal antibodies, which include but are not limited to the EBV hybridoma technique, the human N-cell hybridoma technique, and the trioma technique.

[0321] In addition, antibodies selectively immunoreactive with a protein complex of the present invention may also be recombinantly produced. For example, cDNAs prepared by PCR amplification from activated B-lymphocytes or hybridomas may be cloned into an expression vector to form a cDNA library, which is then introduced into a host cell for recombinant expression. The cDNA encoding a specific desired protein may then be isolated from the library. The isolated cDNA can be introduced into a suitable host cell for the expression of the protein. Thus, recombinant techniques can be used to recombinantly produce specific native antibodies, hybrid antibodies capable of simultaneous reaction with more than one antigen, chimeric antibodies (e.g., the constant and variable regions are derived from different sources), univalent antibodies which comprise one heavy and light chain pair coupled with the Fc region of a third (heavy) chain, Fab proteins, and the like. See U.S. Pat. No. 4,816,567; European Pat. Publication No. 0088994; Munro, Nature, 312:597 (1984); Morrison, Science, 229:1202 (1985); Oi et al., BioTechniques, 4:214 (1986); and Wood et al., Nature, 314:446-449 (1985), all of which are incorporated herein by reference. Antibody fragments such as Fv fragments, single-chain Fv fragments (scFv), Fab′ fragments, and F(ab′)₂ fragments can also be recombinantly produced by methods disclosed in, e.g., U.S. Pat. No.4,946,778; Skerra & Pluckthun, Science, 240:1038-1041(1988); Better et al., Science, 240:1041-1043 (1988); and Bird, et al., Science, 242:423-426 (1988), all of which are incorporated herein by reference.

[0322] In a preferred embodiment, the antibodies provided in accordance with the present invention are partially or fully humanized antibodies. For this purpose, any methods known in the art may be used. For example, partially humanized chimeric antibodies having V regions derived from the tumor-specific mouse monoclonal antibody, but human C regions are disclosed in Morrison and Oi, Adv. Immunol., 44:65-92 (1989). In addition, fully humanized antibodies can be made using transgenic non-human animals. For example, transgenic non-human animals such as transgenic mice can be produced in which endogenous immunoglobulin genes are suppressed or deleted, while heterologous antibodies are encoded entirely by exogenous immunoglobulin genes, preferably human immunoglobulin genes, recombinantly introduced into the genome. See e.g., U.S. Pat. Nos. 5,530,101; 5,545,806; 6,075,181; PCT Publication No. WO 94/02602; Green et. al., Nat. Genetics, 7: 13-21 (1994); and Lonberg et al., Nature 368: 856-859 (1994), all of which are incorporated herein by reference. The transgenic non-human host animal may be immunized with suitable antigens such as a protein complex of the present invention or one or more of the interacting protein members thereof to illicit specific immune response thus producing humanized antibodies. In addition, cell lines producing specific humanized antibodies can also be derived from the immunized transgenic non-human animals. For example, mature B-lymphocytes obtained from a transgenic animal producing humanized antibodies can be fused to myeloma cells and the resulting hybridoma clones may be selected for specific humanized antibodies with desired binding specificities. Alternatively, cDNAs may be extracted from mature B-lymphocytes and used in establishing a library which is subsequently screened for clones encoding humanized antibodies with desired binding specificities.

[0323] In yet another embodiment, a bifunctional antibody is provided which has two different antigen binding sites, each being specific to a different interacting protein member in a protein complex of the present invention. The bifunctional antibody may be produced using a variety of methods known in the art. For example, two different monoclonal antibody-producing hybridomas can be fused together. One of the two hybridomas may produce a monoclonal antibody specific against an interacting protein member of a protein complex of the present invention, while the other hybridoma generates a monoclonal antibody immunoreactive with another interacting protein member of the protein complex. The thus formed new hybridoma produces different antibodies including a desired bifunctional antibody, i.e., an antibody immunoreactive with both of the interacting protein members. The bifunctional antibody can be readily purified. See Milstein and Cuello, Nature, 305:537-540 (1983).

[0324] Alternatively, a bifunctional antibody may also be produced using heterobifunctional crosslinkers to chemically link two different monoclonal antibodies, each being immunoreactive with a different interacting protein member of a protein complex. Therefore, the aggregate will bind to two interacting protein members of the protein complex. See Staerz et al, Nature, 314:628-631(1985); Perez et al, Nature, 316:354-356 (1985).

[0325] In addition, bifunctional antibodies can also be produced by recombinantly expressing light and heavy chain genes in a hybridoma that itself produces a monoclonal antibody. As a result, a mixture of antibodies including a bifunctional antibody is produced. See DeMonte et al, Proc. Natl. Acad. Sci., U.S.A, 87:2941-2945 (1990); Lenz and Weidle, Gene, 87:213-218 (1990).

[0326] Preferably, a bifunctional antibody in accordance with the present invention is produced by the method disclosed in U.S. Pat. No. 5,582,996, which is incorporated herein by reference. For example, two different Fabs can be provided and mixed together. The first Fab can bind to an interacting protein member of a protein complex, and has a heavy chain constant region having a first complementary domain not naturally present in the Fab but capable of binding a second complementary domain. The second Fab is capable of binding another interacting protein member of the protein complex, and has a heavy chain constant region comprising a second complementary domain not naturally present in the Fab but capable of binding to the first complementary domain. Each of the two complementary domains is capable of stably binding to the other but not to itself. For example, the leucine zipper regions of c-fos and c-jun oncogenes may be used as the first and second complementary domains. As a result, the first and second complementary domains interact with each other to form a leucine zipper thus associating the two different Fabs into a single antibody construct capable of binding to two antigenic sites.

[0327] Other suitable methods known in the art for producing bifunctional antibodies may also be used, which include those disclosed in Holliger et al., Proc. Nat'l Acad. Sci. U.S.A, 90:6444-6448 (1993); de Kruifetal., J. Biol. Chem., 271:7630-7634 (1996); Coloma and Morrison, Nat. Biotechnol, 15:159-163 (1997); Muller et al., FEBSLett., 422:259-264 (1998); and Mulleretal., FEBSLett., 432:45-49 (1998), all of which are incorporated herein by reference.

4. Methods of Detecting Protein Complex and Diagnosis

[0328] Another aspect of the present invention relates to methods for detecting the protein complexes of the present invention, particularly for determining the level of a specific protein complex in a patient sample.

[0329] In one embodiment, the level of a protein complex having FHOS and one or more proteins selected from the group consisting of GROUP1 in a cell, tissue, or organ of a patient is determined. An aberrant level is thus detected. For example, the protein complex can be isolated or purified from a patient sample obtained from a cell, tissue, or organ of the patient and the amount thereof is determined. As described above, the protein complex can be prepared from a cell, tissue or organ sample by coimmunoprecipitation using an antibody immunoreactive with an interacting protein member, a bifunctional antibody that is immunoreactive with two or more interacting protein members of the protein complex, or preferably an antibody selectively immunoreactive with the protein complex. When bifunctional antibodies or antibodies immunoreactive with only free interacting protein members are used, individual interacting protein members not complexed with other proteins may also be isolated along with the protein complex containing such individual proteins. However, they can be readily separated from the protein complex using methods known in the art, e.g., size-based separation methods such as gel filtration, or by subtracting the protein complex from the mixture using an antibody specific against another individual interacting protein member. Additionally, proteins in a sample can be separated in a gel such as polyacrylamide gel and subsequently immunoblotted using an antibody immunoreactive with the protein complex.

[0330] Alternatively, the level of the protein complex can be determined in a sample without separation, isolation or purification. For this purpose, it is preferred that an antibody selectively immunoreactive with the specific protein complex is used in an immunoassay. For example, immunocytochemical methods can be used. Other well known antibody-based techniques can also be used including, e.g., enzyme-linked immunosorbent assay (ELISA), radioimmunoassay (RIA), immunoradiometric assays (IRMA), fluorescent immunoassays, protein A immunoassays, and immunoenzymatic assays (IEMA). See e.g., U.S. Pat. Nos. 4,376,110 and 4,486,530, both of which are incorporated herein by reference.

[0331] In addition, since a specific protein complex is formed from its interacting protein members, if one of the interacting protein members is at a relatively low level in a patient, it may be reasonably expected that the level of the protein complex in the patient may also be low. Therefore, the level of an individual interacting protein member of a specific protein complex can be determined in a patient sample which can be used as a reasonably accurate indicator of the level of the protein complex in the sample. For this purpose, antibodies against an individual interacting protein member of a specific complex can be used in any one of the methods described above. In a preferred embodiment, the level of each of the interacting protein members of a protein complex is determined in a patient sample and the relative level of the protein complex is then deduced.

[0332] In addition, the relative protein complex level in a patient can also be determined by determining the level of the mRNA encoding an interacting protein member of the protein complex. Preferably, each interacting protein member's mRNA level in a patient sample is determined. For this purpose, methods for determining mRNA level generally known in the art may all be used. Examples of such methods include, e.g., Northern blot assay, dot blot assay, PCR assay (preferably quantitative PCR assay), in situ hybridization assay, and the like.

[0333] As discussed above, the interactions between FHOS and the proteins GROUP1 suggest that these proteins and/or the protein complexes formed by such proteins may be involved in the same biological processes and disease pathways. In addition, the interactions between FHOS and GROUP1 under physiological conditions may lead to the formation of protein complexes in vivo, which contain FHOS and one or more of the FHOS-interacting proteins. The protein complexes are expected to mediate the functions and biological activities of FHOS and GROUP1. For example, FHOS and the FHOS-interacting proteins may be involved in signal transduction, cytoskeleton rearrangement, membrane trafficking, cell polarity, cell movement, transcription activation or inhibition, protein synthesis and cell-cycle regulation and associated with diseases and disorders such as diabetes mellitus, cardiovascular disease, hypertension, nephropathy, acute and chronic inflammatory disorders, autoimmune diseases, cell proliferative disorders, cancers and neurodegenerative disorders. Thus, aberrations in the level and/or activity of the protein complexes and/or the proteins such as FHOS and the FHOS-interacting proteins may result in diseases or disorders such as diabetes mellitus, cardiovascular disease, hypertension, nephropathy, acute and chronic inflammatory disorders, autoimmune diseases, cell proliferative disorders, cancers and neurodegenerative disorders. Thus, the aberration in the protein complexes or the individual proteins and the degree of the aberration may be indicators for the diseases or disorders. They may be used as parameters for classifying and/or staging one of the above-described diseases. In addition, they may also be indicators for patients' response to a drug therapy.

[0334] Association between a physiological state (e.g., physiological disorder, predisposition to the disorder, a disease state, response to a drug therapy, or other physiological phenomena or phenotypes) and a specific aberration in a protein complex of the present invention or an individual interacting member thereof can be readily determined by comparative analysis of the protein complex and/or the interacting members thereof in a normal population and an abnormal or affected population. Thus, for example, one can study the level, localization and distribution of a particular protein complex, mutations in the interacting protein members of the protein complex, and/or the binding affinity between the interacting protein members in both a normal population and a population affected with a particular physiological disorder described above. The study results can be compared and analyzed by statistical means. Any detected statistically significant difference in the two populations would indicate an association. For example, if the level of the protein complex is statistically significantly higher in the affected population than in the normal population, then it can be reasonably concluded that higher level of the protein complex is associated with the physiological disorder.

[0335] Thus, once an association is established between a particular type of aberration in a particular protein complex of the present invention or in an interacting protein member thereof and a physiological disorder or disease or predisposition to the physiological disorder or disease, then the particular physiological disorder or disease or predisposition to the physiological disorder or disease can be diagnosed or detected by determining whether a patient has the particular aberration.

[0336] Accordingly, the present invention also provides a method for diagnosing a disease or physiological disorder or a predisposition to the disease or disorder such as diabetes mellitus, cardiovascular disease, hypertension, nephropathy, acute and chronic inflammatory disorders, autoimmune diseases, cell proliferative disorders, cancers and neurodegenerative disorders in a patient by determining whether there is any aberration in the patient with respect to a protein complex having a first protein which is FHOS interacting with a second protein selected from the group consisting of GROUP1. The same protein complex is analyzed in a normal individual and is compared with the results obtained in the patient. In this manner, any protein complex aberration in the patient can be detected. As used herein, the term “aberration” when used in the context of protein complexes of the present invention means any alterations of a protein complex including increased or decreased level of the protein complex in a particular cell or tissue or organ or the total body, altered localization of the protein complex in cellular compartments or in locations of a tissue or organ, changes in binding affinity of an interacting protein member of the protein complex, mutations in an interacting protein member or the gene encoding the protein, and the like. As will be apparent to a skilled artisan, the term “aberration” is used in a relative sense. That is, an aberration is relative to a normal individual.

[0337] As used herein, the term “diagnosis” means detecting a disease or disorder or determining the stage or degree of a disease or disorder. The term “diagnosis” also encompasses detecting a predisposition to a disease or disorder, determining the therapeutic effect of a drug therapy, or predicting the pattern of response to a drug therapy or xenobiotics. The diagnosis methods of the present invention may be used independently, or in combination with other diagnosing and/or staging methods known in the medical art for a particular disease or disorder.

[0338] Thus, in one embodiment, the method of diagnosis is conducted by detecting, in a patient, the levels of one or more protein complexes of the present invention using any one of the methods described above, and determining whether the patient has an aberrant level of the protein complexes.

[0339] The diagnosis may also be based on the determination of the levels of one or more interacting protein members (at protein or cDNA or mRNA level) of a protein complex of the present invention. An aberrant level of an interacting protein member may indicate a physiological disorder or a predisposition to a physiological disorder.

[0340] In another embodiment, the method of diagnosis comprises determining, in a patient, the cellular localization, or tissue or organ distribution of a protein complex of the present invention and determining whether the patient has an aberrant localization or distribution of the protein complex. For example, immunocytochemical or immunohistochemical assays can be performed on a cell, tissue or organ sample from a patient using an antibody selectively immunoreactive with a protein complex of the present invention. Antibodies immunoreactive with both an individual interacting protein member and a protein complex containing the protein member may also be used, in which case it is preferred that antibodies immunoreactive with other interacting protein members are also used in the assay. In addition, nucleic acid probes may also be used in in situ hybridization assays to detect the localization or distribution of the mRNAs encoding the interacting protein members of a protein complex. Preferably, the mRNA encoding each interacting protein member of a protein complex is detected concurrently.

[0341] In yet another embodiment, the method of diagnosis of the present invention comprises detecting any mutations in one or more interacting protein members of a protein complex of the present invention. In particular, it is desirable to determine whether the interacting protein members have any mutations that will lead to, or in disequilibrium with, changes in the functional activity of the proteins or changes in their binding affinity to other interacting protein members in forming a protein complex of the present invention. Examples of such mutations include but are not limited to, e.g., deletions, insertions and rearrangements in the genes encoding the protein members, and nucleotide or amino acid substitutions and the like. In a preferred embodiment, the binding domains of the interacting protein members responsible for the protein-protein interactions in forming a protein complex are screened to detect any mutations therein. For example, genomic DNA or cDNA encoding an interacting protein member can be prepared from a patient sample, and sequenced. The thus obtained sequence may be compared with known wild-type sequences to identify any mutations. Alternatively, an interacting protein member may be purified from a patient sample and analyzed by protein sequencing or mass spectrometry to detect any amino acid sequence changes. Any methods known in the art for detecting mutations may be used, as will be apparent to skilled artisans apprised of the present disclosure.

[0342] In another embodiment, the method of diagnosis includes determining the binding constant of the interacting protein members of one or more protein complexes. For example, the interacting protein members can be obtained from a patient by direct purification or by recombinant expression from genomic DNAs or cDNAs prepared from a patient sample encoding the interacting protein members. Binding constants represent the strength of the protein-protein interaction between the interacting protein members in a protein complex. Thus, by measuring binding constant, subtle aberration in binding affinity may be detected.

[0343] A number of methods known in the art for estimating and determining binding constants in protein-protein interactions are reviewed in Phizicky and Fields, et al., Microbiol. Rev., 59:94-123 (1995), which is incorporated herein by reference. For example, protein affinity chromatography may be used. First, columns are prepared with different concentrations of an interacting protein member which is covalently bound to the columns. Then a preparation of an interacting protein partner is run through the column and washed with buffer. The interacting protein partner bound to the interacting protein member linked to the column is then eluted. Binding constant is then estimated based on the concentrations of the bound protein and the eluted protein. Alternatively, the method of sedimentation through gradients monitors the rate of sedimentation of a mixture of proteins through gradients of glycerol or sucrose. At concentrations above the binding constant, proteins sediment as a protein complex. Thus, binding constant can be calculated based on the concentrations. Other suitable methods known in the art for estimating binding constant include but are not limited to gel filtration column such as nonequilibrium “small-zone” gel filtration columns (See e.g., Gill et al., J. Mol. Biol., 220:307-324 (1991)), the Hummel-Dreyer method of equilibrium gel filtration (See e.g., Hummel and Dreyer, Biochim. Biophys. Acta, 63:530-532 (1962)) and large-zone equilibrium gel filtration (See e.g., Gilbert and Kellett, J. Biol. Chem., 246:6079-6086 (1971)), sedimentation equilibrium (See e.g., Rivas and Minton, Trends Biochem., 18:284-287 (1993)), fluorescence methods such as fluorescence spectrum (See e.g., Otto-Bruc et al, Biochemistry, 32:8632-8645 (1993)) and fluorescence polarization or anisotropy with tagged molecules (See e.g., Weiel and Hershey, Biochemistry, 20:5859-5865 (1981)), solution equilibrium measured with immobilized binding protein (See e.g., Nelson and Long, Biochemistry, 30:2384-2390 (1991)), and surface plasmon resonance (See e.g., Panayotou et al., Mol. Cell. Biol., 13:3567-3576 (1993)).

[0344] In another embodiment, the diagnosis method of the present invention comprises detecting protein-protein interactions in functional assay systems such as the yeast two-hybrid system. Accordingly, to determine the protein-protein interaction between two interacting protein members that normally form a protein complex in normal individuals, cDNAs encoding the interacting protein members can be isolated from a patient to be diagnosed. The thus cloned cDNAs or fragments thereof can be subcloned into vectors for use in yeast two-hybrid system. Preferably a reverse yeast two-hybrid system is used such that failure of interaction between the proteins may be positively detected. The use of yeast two-hybrid system or other systems for detecting protein-protein interactions is known in the art and is described below in Section 5.3.1.

[0345] A kit may be used for conducting the diagnosis methods of the present invention. Typically, the kit should contain, in a carrier or compartmentalized container, reagents useful in any of the above-described embodiments of the diagnosis method. The carrier can be a container or support, in the form of, e.g., bag, box, tube, rack, and is optionally compartmentalized. The carrier may define an enclosed confinement for safety purposes during shipment and storage. In one embodiment, the kit includes an antibody selectively immunoreactive with a protein complex of the present invention. In addition, antibodies against individual interacting protein members of the protein complexes may also be included. The antibodies may be labeled with a detectable marker such as radioactive isotopes, and enzymatic or fluorescence markers. Alternatively secondary antibodies such as labeled anti-IgG and the like may be included for detection purposes. Optionally, the kit can include one or more of the protein complexes of the present invention prepared or purified from a normal individual or an individual afflicted with a physiological disorder associated with an aberration in the protein complexes or an interacting protein member thereof. In addition, the kit may further include one or more of the interacting protein members of the protein complexes of the present invention prepared or purified from a normal individual or an individual afflicted with a physiological disorder associated with an aberration in the protein complexes or an interacting protein member thereof. Suitable oligonucleotide primers useful in the amplification of the genes or cDNAs for the interacting protein members may also be provided in the kit. In particular, in a preferred embodiment, the kit includes a first oligonucleotide selectively hybridizable to the mRNA or cDNA encoding FHOS and a second oligonucleotide selectively hybridizable to the mRNA or cDNA encoding a protein selected from the group consisting of GROUP1. Additional oligos hybridizing to FHOS. and its interacting partners as identified in the present invention may also be included. Such oligos may be used as PCR primers for, e.g., quantitative PCR amplification of mRNAs encoding FHOS and an interacting partner thereof, or as hybridizing probes for detecting the mRNAs. The oligonucleotides may have a length of from about 8 nucleotides to about 100 nucleotides, preferably from about 12 to about 50 nucleotides, and more preferably from about 15 to about 30 nucleotides. In addition, the kit may also contain oligonucleotides that can be used as hybridization probes for detecting the cDNAs or mRNAs encoding the interacting protein members. Preferably, instructions for using the kit or reagents contained therein are also included in the kit.

5. Use of Protein Complexes or Interacting Protein Members thereof in Screening Assays

[0346] The protein complexes of the present invention, FHOS and FHOS-interacting proteins such as GROUP1 can also be used in screening assays to identify modulators of the protein complexes, FHOS, and/or the FHOS-interacting proteins. In addition, homologues, derivatives and fragments of FHOS and the FHOS-interacting proteins may also be used in such screening assays. As used herein, the term “modulator” encompasses any compounds that can cause any forms of alteration of the biological activities or functions of the proteins or protein complexes, including, e.g., enhancing or reducing their biological activities, increasing or decreasing their stability, altering their affinity or specificity to certain other biological molecules, etc. In addition, the term “modulator” as used herein also includes any compounds that simply bind FHOS, FHOS-interacting proteins, and/or the proteins complexes of the present invention. For example, a modulator can be a dissociator capable of interfering with or disrupting or dissociating protein-protein interaction between FHOS or a homologue or derivative thereof and a protein selected from the group consisting of GROUP1 or a homologue or derivative thereof. A modulator can also be an enhancer or initiator that initiates or strengthens the interaction between the protein members of a protein complex of the present invention.

[0347] Accordingly, the present invention provides screening methods for selecting modulators of FHOS, an FHOS-interacting protein selected from the group consisting of GROUP1, or a protein complex formed between FHOS and one or more of the FHOS-interacting proteins. Screening methods are also provided for selecting modulators of FHOS homologues, derivatives or fragments, or homologues, derivatives or fragments of an FHOS-interacting protein, or a protein complex formed between an FHOS homologue, derivative or fragment and a homologue or derivative or fragment of an FHOS-interacting protein.

[0348] The modulators selected in accordance with the screen methods of the present invention can be effective in modulating the functions or activities of FHOS, an FHOS-interacting protein, or the protein complexes of the present invention. For example, compounds capable of binding to the protein complexes may be capable of modulating the functions of the protein complexes. Additionally, compounds that interfere with, weaken, dissociate or disrupt, or alternatively, initiate, facilitate or stabilize the protein-protein interaction between the interacting protein members of the protein complexes can also be effective in modulating the functions or activities of the protein complexes. Thus, the compounds identified in the screening methods of the present invention can be made into therapeutically or prophylactically effective drugs for preventing or ameliorating diseases, disorders or symptoms caused by or associated with aberration in the protein complexes or FHOS or the FHOS-interacting proteins of the present invention. Alternatively, they may be used as leads to aid the design and identification of therapeutically or prophylactically effective compounds for diseases, disorders or symptoms caused by or associated with aberration in the protein complexes or FHOS or the FHOS-interacting proteins of the present invention. The protein complexes and/or interacting protein members thereof in accordance with the present invention can be used in any of a variety of drug screening techniques. Drug screening can be performed as described herein or using well-known techniques, such as those described in U.S. Pat. Nos. 5,800,998 and 5,891,628, both of which are incorporated herein by reference.

5.1. Test Compounds

[0349] Any test compounds may be screened in the screening assays of the present invention to select modulators of FHOS, an FHOS-containing protein complex and/or an FHOS-interacting protein of the present invention. By the term “selecting” or “select” compounds it is intended to encompass both (a) choosing compounds from a group previously unknown to be modulators of FHOS, an FHOS-containing protein complex and/or an FHOS-interacting protein of the present invention, and (b) testing compounds that are known to be capable of binding, or modulating the functions and activities of, FHOS, an FHOS-containing protein complex and/or an FHOS-interacting protein of the present invention. Both types of compounds are generally referred to herein as “test compounds.” The test compounds may include, by way of example, proteins (e.g., antibodies, small peptides, artificial or natural proteins), nucleic acids, and derivatives, mimetics and analogs thereof, and small organic molecules having a molecular weight of no greater than 10,000 dalton, more preferably less than 5,000 dalton. Preferably, the test compounds are provided in library formats known in the art, e.g., in chemically synthesized libraries, recombinantly expressed libraries (e.g., phage display libraries), and in vitro translation-based libraries (e.g., ribosome display libraries).

[0350] For example, the screening assays of the present invention can be used in the antibody production processes described in Section 3 to select antibodies with desirable specificities. Various forms antibodies or derivatives thereof may be screened, including but not limited to, polyclonal antibodies, monoclonal antibodies, bifunctional antibodies, chimeric antibodies, single chain antibodies, antibody fragments such as Fv fragments, single-chain Fv fragments (scFv), Fab′ fragments, and F(ab′)₂ fragments, and various modified forms of antibodies such as catalytic antibodies, and antibodies conjugated to toxins or drugs, and the like. The antibodies can be of any types such as IgQ IgE, IgA, or IgM. Humanized antibodies are particularly preferred. Preferably, the various antibodies and antibody fragments may be provided in libraries to allow large-scale high throughput screening. For example, expression libraries expressing antibodies or antibody fragments may be constructed by a method disclosed, e.g., in Huse et al., Science, 246:1275-1281 (1989), which is incorporated herein by reference. Single-chain Fv (scFv) antibodies are of particular interest in diagnostic and therapeutic applications. Methods for providing antibody libraries are also provided in U.S. Pat. Nos. 6,096,551; 5,844,093; 5,837,460; 5,789,208; and 5,667,988, all of which are incorporated herein by reference.

[0351] Peptidic test compounds may be peptides having L-amino acids and/or D-amino acids, phosphopeptides, and other types of peptides. The screened peptides can be of any size, but preferably have less than about 50 amino acids. Smaller peptides are easier to deliver into a patient's body. Various forms of modified peptides may also be screened. Like antibodies, peptides can also be provided in, e.g., combinatorial libraries. See generally, Gallop et al., J. Med. Chem., 37:1233-1251 (1994). Methods for making random peptide libraries are disclosed in, e.g., Devlin et al., Science, 249:404-406 (1990). Other suitable methods for constructing peptide libraries and screening peptides therefrom are disclosed in, e.g., Scott and Smith, Science, 249:386-390 (1990); Moran et al., J. Am. Chem. Soc., 117:10787-10788 (1995) (a library of electronically tagged synthetic peptides); Stachelhaus et al., Science, 269:69-72 (1995); U.S. Pat. Nos. 6,156,511; 6,107,059; 6,015,561; 5,750,344; 5,834,318; 5,750,344, all of which are incorporated herein by reference. For example, random-sequence peptide phage display libraries may be generated by cloning synthetic oligonucleotides into the gene III or gene VIII of an E. coli. filamentous phage. The thus generated phage can propagate in E. coli and express peptides encoded by the oligonucleotides as fusion proteins on the surface of the phage. Scott and Smith, Science, 249:368-390 (1990). Alternatively, the “peptides on plasmids” method may also be used to form peptide libraries. In this method, random peptides may be fused to the C-terminus of the E. coli. Lac repressor by recombinant technologies and expressed from a plasmid that also contains Lac repressor-binding sites. As a result, the peptide fusions bind to the same plasmid that encodes them.

[0352] Small organic or inorganic non-peptide non-nucleotide compounds are preferred test compounds for the screening assays of the present invention. They too can be provided in a library format. See generally, Gordan et al. J. Med. Chem., 37:1385-1401 (1994). For example, benzodiazepine libraries are provided in Bunin and Ellman, J. Am. Chem. Soc., 114:10997-10998 (1992), which is incorporated herein by reference. A method for constructing and screening peptide libraries are disclosed in Simon et al., Proc. Natl. Acad. Sci. U.S.A, 89:9367-9371 (1992). Methods for the biosynthesis of novel polypeptides in a library format are described in McDaniel et al, Science, 262:1546-1550 (1993) and Kao et al., Science, 265:509-512 (1994). Various libraries of small organic molecules and methods of construction thereof are disclosed in U.S. Pat. Nos. 6,162,926 (multiply-substituted fullerene derivatives); 6,093,798 (hydroxamic acid derivatives); 5,962,337 (combinatorial 1,4-benzodiazepin-2, 5-dione library); 5,877,278 (Synthesis of N-substituted oligomers); 5,866,341 (compositions and methods for screening drug libraries); 5,792,821 (polymerizable cyclodextrin derivatives); 5,766,963 (hydroxypropylamine library); and 5,698,685 (morpholino-subunit combinatorial library), all of which are incorporated herein by reference.

[0353] Other compounds such as oligonucleotides and peptide nucleic acids (PNA), and analogs and derivatives thereof may also be screened to identify clinically useful compounds. Combinatorial libraries of oligos are also known in the art. See Gold et al., J. Biol. Chem., 270:13581-13584 (1995).

5.2. In vitro Assays

[0354] The test compounds may be screened in an in vitro assay to identify compounds capable of binding the protein complexes or interacting protein members thereof in accordance with the present invention. For this purpose, a test compound is contacted with a protein complex or an interacting protein member thereof under conditions and for a time sufficient to allow specific interaction between the test compound and the target components to occur and thus binding of the compound to the target forming a complex. Subsequently, the binding event is detected.

[0355] Agonists as used herein are those compounds that enhance the desired activities or properties for protein interactions. Antagonists are those compounds that interfere with or block the desired activities or properties for protein interactions.

[0356] Various screening techniques known in the art may be used in the present invention. The protein complexes and the interacting protein members thereof may be prepared by any suitable methods, e.g., by recombinant expression and purification. The protein complexes and/or interacting protein members thereof (both are referred to as “target” hereinafter in this section) may be free in solution. A test compound may be mixed with a target forming a liquid mixture. The compound may be labeled with a detectable marker. Upon mixing under suitable conditions, the binding 5 complex having the compound and the target may be co-immunoprecipitated and washed. The compound in the precipitated complex may be detected based on the marker on the compound.

[0357] In a preferred embodiment, the target is immobilized on a solid support or on a cell surface. Preferably, the target can be arrayed into a protein microchip in a method described in Section 2.3. For example, a target may be immobilized directly onto a microchip substrate such as glass slides or onto a multi-well plates using non-neutralizing antibodies, i.e., antibodies capable of binding to the target but do not substantially affect its biological activities. To effect the screening, test compounds can be contacted with the immobilized target to allow binding to occur to form complexes under standard binding assay conditions. Either the targets or test compounds are labeled with a detectable marker using well-known labeling techniques. For example, U.S. Pat. No. 5,741,713 discloses combinatorial libraries of biochemical compounds labeled with NMR active isotopes. To identify binding compounds, one may measure the formation of the target-test compound complexes or kinetics for the formation thereof. When combinatorial libraries of organic non-peptide non-nucleic acid compound are screened, it is preferred that labeled or encoded (or “tagged”) combinatorial libraries are used to allow rapid decoding of lead structures. This is especially important because, unlike biological libraries, individual compounds found in chemical libraries cannot be amplified by self-amplification. Tagged combinatorial libraries are provided in, e.g., Borchardt and Still, J. Am. Chem. Soc., 116:373-374 (1994) and Moran et al., J. Am. Chem. Soc., 117:10787-10788 (1995), both of which are incorporated herein by reference.

[0358] Alternatively, the test compounds can be immobilized on a solid support, e.g., forming a microarray of test compounds. The target protein or protein complex is then contacted with the test compounds. The target may be labeled with any suitable detection marker. For example, the target may be labeled with radioactive isotopes or fluorescence marker before binding reaction occurs. Alternatively, after the binding reactions, antibodies that are immunoreactive with the target and are labeled with radioactive materials, fluorescence markers, enzymes, or labeled secondary anti-Ig antibodies may be used to detect any bound target thus identifying the binding compound. One example of this embodiment is the protein probing method. That is, the target provided in accordance with the present invention is used as a probe to screen expression libraries of proteins or random peptides. The expression libraries can be phage display libraries, in vitro translation-based libraries, or ordinary expression cDNA libraries. The libraries may be immobilized on a solid support such as nitrocellulose filters. See e.g., Sikela and Hahn, Proc. Natl. Acad. Sci. U.S.A, 84:3038-3042 (1987). The probe may be labeled by a radioactive isotope or a fluorescence marker. Alternatively, the probe can be biotinylated and detected with a streptavidin-alkaline phosphatase conjugate. More conveniently, the bound probe may be detected with an antibody.

[0359] In yet another embodiment, a known ligand capable of binding to the target can be used in competitive binding assays. Complexes between the known ligand and the target can be formed and then contacted with test compounds. The ability of a test compound to interfere with the interaction between the target and the known ligand is measured. One exemplary ligand is an antibody capable of specifically binding the target. Particularly, such an antibody is especially useful for identifying peptides that share one or more antigenic determinants of the target protein complex or interacting protein members thereof.

[0360] In a specific embodiment, a protein complex used in the screening assay includes a hybrid protein as described in Section 2.1, which is formed by fusion of two interacting protein members or fragments or domains thereof. The hybrid protein may also be designed such that it contains a detectable epitope tag fused thereto. Suitable examples of such epitope tags include sequences derived from, e.g., influenza virus hemagglutinin (HA), Simian Virus 5 (V5), polyhistidine (6xHis), c-myc, lacZ, GST, and the like.

[0361] Test compounds may be also screened in an in vitro assay to identify compounds capable of dissociating the protein complexes identified in accordance with the present invention. Thus, for example, an FHOS-containing protein complex can be contacted with a test compound and the protein complex can be detected. Conversely, test compounds may also be screened to identify compounds capable of enhancing the interaction between FHOS and an FHOS-interacting protein or stabilizing the protein complex formed by the two proteins.

[0362] The assay can be conducted in similar manners as the binding assays described above. For example, the presence or absence of a particular protein complex can be detected by an antibody selectively immunoreactive with the protein complex. Thus, after incubation of the protein complex with a test compound, immunoprecipitation assay can be conducted with the antibody. If the test compound disrupts the protein complex, then the amount of immunoprecipitated protein complex in this assay will be significantly less than that in a control assay in which the same protein complex is not contacted with the test compound. Similarly, two proteins the interaction between which is to be enhanced may be incubated together with a test compound. Thereafter, protein complex may be detected by the selectively immunoreactive antibody. The amount of protein complex may be compared to that formed in the absence of the test compound. Various other detection methods may be suitable in the dissociation assay, as will be apparent to skilled artisan apprised of the present disclosure.

5.3. In vivo Screening Assay

[0363] Test compounds can also be screened in any in vivo assays select modulators of the protein complexes or interacting protein members thereof in accordance with the present invention. For example, any in vivo assays known in the art useful in identifying compounds capable of strengthening or interfering with the stability of the protein complexes of the present invention may be used.

5.3.1. Two-Hybrid Assay

[0364] In a preferred embodiment, one of the yeast two-hybrid systems or their 10 analogous or derivative forms is used. Examples of suitable two-hybrid systems known in the art include, but are not limited to, those disclosed in U.S. Pat. Nos. 5,283,173; 5,525,490; 5,585,245; 5,637,463; 5,695,941; 5,733,726; 5,776,689; 5,885,779; 5,905,025; 6,037,136; 6,057,101; 6,114,111; and Bartel and Fields, eds., The Yeast Two-Hybrid System, Oxford University Press, New York, N.Y., 1997, all of which are incorporated herein by reference.

[0365] Typically, in a classic transcription-based two-hybrid assay, two chimeric genes are prepared encoding two fusion proteins: one contains a transcription activation domain fused to an interacting protein member of a protein complex of the present invention or an interacting domain of the interacting protein member, while the other fusion protein includes a DNA binding domain fused to another interacting protein member of the protein complex or an interacting domain thereof. For the purpose of convenience, the two interacting protein members or interacting domains thereof are referred to as “bait fusion protein” and “prey fusion protein,” respectively. The chimeric genes encoding the fusion proteins are termed “bait chimeric gene” and “prey chimeric gene,” respectively. Typically, a “bait vector” and a “prey vector” are provided for the expression of a bait chimeric gene and a prey chimeric gene, respectively.

5.3.1.1. Vectors

[0366] Many types of vectors can be used in a transcription-based two-hybrid assay. Methods for the construction of bait vectors and prey vectors should be apparent to skilled artisans in the art apprised of the present disclosure. See generally, Current Protocols in Molecular Biology, Vol. 2, Ed. Ausubel, et al., Greene Publish. Assoc. & Wiley Interscience, Ch. 13, 1988; Glover, DNA Cloning, Vol. 11, IRL Press, Wash., D.C., Ch. 3, 1986; Bitter, et al, in Methods in Enzymology 153:516-544 (1987); The Molecular Biology of the Yeast Saccharomyces, Eds. Strathern et al., Cold Spring Harbor Press, Vols. I and II, 1982; and Rothstein in DNA Cloning: A Practical Approach, Vol. 11, Ed. D M Glover, IRL Press, Wash., D.C., 1986.

[0367] Generally, the bait and prey vectors may include a promoter operably linked to a chimeric gene for the transcription of the chimeric gene, an origin of DNA replication for the replication of the vectors in host cells and a replication origin for the amplification of the vectors in, e.g., E. coli, and selection marker(s) for selecting and maintaining only those host cells harboring the vectors. Additionally, the vectors preferably also contain inducible elements, which function to control the expression of a chimeric gene. Making the expression of the chimeric genes inducible and controllable is especially important in the event that the fusion proteins or components thereof are toxic to the host cells. Other regulatory sequences such as transcriptional enhancer sequences and translation regulation sequences (e.g., Shine-Dalgamo sequence) can also be included. Termination sequences such as the bovine growth hormone, SV40, lacZ and AcMNPV polyhedral polyadenylation signals may also be operably linked to a chimeric gene. An epitope tag coding sequence for detection and/or purification of the fusion proteins can also be incorporated into the expression vectors. Examples of useful epitope tags include, but are not limited to, influenza virus hemagglutinin (HA), Simian Virus 5 (V5), polyhistidine (6xHis), c-myc, lacZ, GST, and the like. Proteins with polyhistidine tags can be easily detected and/or purified with Ni affinity columns, while specific antibodies to many epitope tags are generally commercially available. The vectors can be introduced into the host cells by any techniques known in the art, e.g., by direct DNA transformation, microinjection, electroporation, viral infection, lipofection, gene gun, and the like. The bait and prey vectors can be maintained in host cells in an extrachromosomal state, i.e., as self-replicating plasmids or viruses. Alternatively, one or both vectors can be integrated into chromosomes of the host cells by conventional techniques such as selection of stable cell lines or site-specific recombination.

[0368] The in vivo assays of the present invention can be conducted in many different host cells, including but not limited to bacteria, yeast cells, plant cells, insect cells, and mammalian cells. A skilled artisan will recognize that the designs of the vectors can vary with the host cells used. In one embodiment, the assay is conducted in prokaryotic cells such as Escherichia coli, Salmonella, Klebsiella, Pseudomonas, Caulobacter, and Rhizobium. Suitable origins of replication for the expression vectors useful in this embodiment of the present invention include, e.g., the ColE1, pSC10, and M13 origins of replication. Examples of suitable promoters include, for example, the T7 promoter, the lacZ promoter, and the like. In addition, inducible promoters are also useful in modulating the expression of the chimeric genes. For example, the lac operon from bacteriophage lambda placS is well known in the art and is inducible by the addition of IPTG to the growth medium. Other known inducible promoters useful in a bacteria expression system include pL of bacteriophage lambda, the trp promoter, and hybrid promoters such as the tac promoter, and the like.

[0369] In addition, selection marker sequences for selecting and maintaining only those prokaryotic cells expressing the desirable fusion proteins should also be incorporated into the expression vectors. Numerous selection markers including auxotrophic markers and antibiotic resistance markers are known in the art and can all be useful for purposes of this invention. For example, the bla gene which confers ampicillin resistance is the most commonly used selection marker in prokaryotic expression vectors. Other suitable markers include genes that confer neomycin, kanamycin, or hygromycin resistance to the host cells. In fact, many vectors are commercially available from vendors such as Invitrogen Corp. of San Diego, Calif., Clontech Corp. of Palo Alto, Calif., BRL of Bethesda, Maryland, and Promega Corp. of Madison, Wisconsin. These commercially available vectors, e.g., pBR322, pSPORT, pBluescriptIISK, pcDNAI, and pcDNAII all have a multiple cloning site into which the chimeric genes of the present invention can be conveniently inserted using conventional recombinant techniques. The constructed expression vectors can be introduced into host cells by various transformation or transfection techniques generally known in the art.

[0370] In another embodiment, mammalian cells are used as host cells for the expression of the fusion proteins and detection of protein-protein interactions. For. this purpose, virtually any mammalian cells can be used including normal tissue cells, stable cell lines, and transformed tumor cells. Conveniently, mammalian cell lines such as CHO cells, Jurkat T cells, NIH 3T3 cells, HEK-293 cells, CV-1 cells, COS-1 cells, HeLa cells, VERO cells, MDCK cells, W138 cells, and the like are used. Mammalian expression vectors are well known in the art and many are commercially available. Examples of suitable promoters for the transcription of the chimeric genes in mammalian cells include viral transcription promoters derived from adenovirus, simian virus 40 (SV40) (e.g., the early and late promoters of SV40), Rous sarcoma virus (RSV), and cytomegalovirus (CMV) (e.g., CMV immediate-early promoter), human immunodeficiency virus (HIV) (e.g., long terminal repeat (LTR)), vaccinia virus (e.g., 7.5K promoter), and herpes simplex virus (HSV) (e.g., thymidine kinase promoter). Inducible promoters can also be used. Suitable inducible promoters include, for example, the tetracycline responsive element (TRE) (See Gossen et al., Proc. Natl. Acad. Sci. U.S.A, 89:5547-5551 (1992)), metallothionein IIA promoter, ecdysone-responsive promoter, and heat shock promoters. Suitable origins of replication for the replication and maintenance of the expression vectors in mammalian cells include, e.g., the Epstein Barr origin of replication in the presence of the Epstein Barr nuclear antigen (see Sugden et al., Mole. Cell. Biol., 5:410-413 (1985)) and the SV40 origin of replication in the presence of the SV40 T antigen (which is present in COS-1 and COS-7 cells) (see Margolskee et al., Mole. Cell. Biol., 8:2837 (1988)). Suitable selection markers include, but are not limited to, genes conferring resistance to neomycin, hygromycin, zeocin, and the like. Many commercially available mammalian expression vectors may be useful for the present invention, including, e.g., pCEP4, pcDNAI, pIND, pSecTag2, pVAX1, pcDNA3.1, and pBI-EGFP, and pDisplay. The vectors can be introduced into mammalian cells using any known techniques such as calcium phosphate precipitation, lipofection, electroporation, and the like. The bait vector and prey vector can be co-transformed into the same cell or, alternatively, introduced into two different cells which are subsequently fused together by cell fusion or other suitable techniques.

[0371] Viral expression vectors, which permit introduction of recombinant genes into cells by viral infection, can also be used for the expression of the fusion proteins. Viral expression vectors generally known in the art include viral vectors based on adenovirus, bovine papilloma virus, murine stem cell virus (MSCV), MFG virus, and retrovirus. See Sarver, et al., Mol. Cell. Biol., 1:486(1981); Logan & Shenk, Proc. Natl. Acad. Sci. U.S.A, 81:3655-3659 (1984); Mackett, et al., Proc. Natl. Acad. Sci. U.S.A, 79:7415-7419 (1982); Mackett, et al., J. Virol., 49:857-864 (1984); Panicali, et al., Proc. Natl. Acad. Sci. U.S.A, 79:4927-4931 (1982); Cone & Mulligan, Proc. Natl. Acad. Sci. U.S.A, 81:6349-6353 (1984); Mann et al., Cell, 33:153-159 (1993); Pear et al., Proc. Natl. Acad. Sci. U.S.A, 90:8392-8396 (1993); Kitamura et al., Proc. Natl. Acad. Sci. U.S.A, 92:9146-9150 (1995); Kinsella et al., Human Gene Therapy, 7:1405-1413 (1996); Hofinann et al., Proc. Natl. Acad. Sci. U.S.A, 93:5185-5190 (1996); Choate et al., Human Gene Therapy, 7:2247 (1996); WO 94/19478; Hawley et al., Gene Therapy, 1:136 (1994) and Rivere et al., Genetics, 92:6733 (1995), all of which are incorporated by reference.

[0372] Generally, to construct a viral vector, a chimeric gene according to the present invention can be operably linked to a suitable promoter. The promoter-chimeric gene construct is then inserted into a non-essential region of the viral vector, typically a modified viral genome. This results in a viable recombinant virus capable of expressing the fusion protein encoded by the chimeric gene in infected host cells. Once in the host cell, the recombinant virus typically is integrated into the genome of the host cell. However, recombinant bovine papilloma viruses typically replicate and remain as extrachromosomal elements.

[0373] In another embodiment, the detection assays of the present invention are conducted in plant cell systems. Methods for expressing exogenous proteins in plant cells are well known in the art. See generally, Weissbach & Weissbach, Methods for Plant Molecular Biology, Academic Press, N.Y., 1988; Grierson & Corey, Plant Molecular Biology, 2d Ed., Blackie, London, 1988. Recombinant virus expression vectors based on, e.g., cauliflower mosaic virus (CaMV) or tobacco mosaic virus (TMV) can all be used. Alternatively, recombinant plasmid expression vectors such as Ti plasmid vectors and Ri plasmid vectors are also useful. The chimeric genes encoding the fusion proteins of the present invention can be conveniently cloned into the expression vectors and placed under control of a viral promoter such as the 35S RNA and 19S RNA promoters of CaMV or the coat protein promoter of TMV, or of a plant promoter, e.g., the promoter of the small subunit of RUBISCO and heat shock promoters (e.g., soybean hsp17.5-E or hsp 17.3-B promoters).

[0374] In addition, the in vivo assay of the present invention can also be conducted in insect cells, e.g., Spodoptera frugiperda cells, using a baculovirus expression system. Expression vectors and host cells useful in this system are well known in the art and are generally available from various commercial vendors. For example, the chimeric genes of the present invention can be conveniently cloned into a non-essential region (e.g., the polyhedrin gene) of an Autographa californica nuclear polyhedrosis virus (AcNPV) vector and placed under control of an AcNPV promoter (e.g., the polyhedrin promoter). The non-occluded recombinant viruses thus generated can be used to infect host cells such as Spodoptera frugiperda cells in which the chimeric genes are expressed. See U.S. Pat. No.4,215,051.

[0375] In a preferred embodiment of the present invention, the fusion proteins are expressed in a yeast expression system using yeasts such as Saccharomyces cerevisiae, Hansenula polymorpha, Pichia pastoris, and Schizosaccharomyces pombe as host cells. The expression of recombinant proteins in yeasts is a well-developed field, and the techniques useful in this respect are disclosed in detail in The Molecular Biology of the Yeast Saccharomyces, Eds. Strathern et al., Vols. I and II, Cold Spring Harbor Press, 1982; Ausubel et al., Current Protocols in Molecular Biology, New York, Wiley, 1994; and Guthrie and Fink, Guide to Yeast Genetics and Molecular Biology, in Methods in Enzymology, Vol. 194, 1991, all of which are incorporated herein by reference. Sudbery, Curr Opin. Biotech., 7:517-524 (1996) reviews the success in the art in expressing recombinant proteins in various yeast species; the entire content and references cited therein are incorporated herein by reference. In addition, Bartel and Fields, eds., The Yeast Two-Hybrid System, Oxford University Press, New York, N.Y., 1997 contains extensive discussions of recombinant expression of fusion proteins in yeasts in the context of various yeast two-hybrid systems, and cites numerous relevant references. These and other methods known in the art can all be used for purposes of the present invention. The application of such methods to the present invention should be apparent to a skilled artisan apprised of the present disclosure.

[0376] Generally, each of the two chimeric genes is included in a separate expression vector (bait vector and prey vector). Both vectors can be co-transformed into a single yeast host cell. As will be apparent to a skilled artisan, it is also possible to express both chimeric genes from a single vector. In a preferred embodiment, the bait vector and prey vector are introduced into two haploid yeast cells of opposite mating types, e.g., a-type and a-type, respectively. The two haploid cells can be mated at a desired time to form a diploid cell expressing both chimeric genes.

[0377] Generally, the bait and prey vectors for recombinant expression in yeast include a yeast replication origin such as the 2i origin or the ARSH4 sequence for the replication and maintenance of the vectors in yeast cells. Preferably, the vectors also have a bacteria origin of replication (e.g., ColE1) and a bacteria selection marker (e.g., ampr marker, i.e., bla gene). Optionally, the CEN6 centromeric sequence is included to control the replication of the vectors in yeast cells. Any constitutive or inducible promoters capable of driving gene transcription in yeast cells may be employed to control the expression of the chimeric genes. Such promoters are operably linked to the chimeric genes. Examples of suitable constitutive promoters include but are not limited to the yeast ADH1, PGK1, TEF2, GPD1, HIS3, and CYC1 promoters. Example of suitable inducible promoters include but are not limited to the yeast GAL1 (inducible by galactose), CUPI (inducible by Cu⁺⁺), and FUS1 (inducible by pheromone) promoters; the AOX/MOX promoter from H. polymorpha and P. Pastoris (repressed by glucose or ethanol and induced by methanol); chimeric promoters such as those that contain LexA operators (inducible by LexA-containing transcription factors); and the like. Inducible promoters are preferred when the fusion proteins encoded by the chimeric genes are toxic to the host cells. If it is desirable, certain transcription repressing sequences such as the upstream repressing sequence (URS) from SPO13 promoter can be operably linked to the promoter sequence, e.g., to the 5′ end of the promoter region. Such upstream repressing sequences function to fine-tune the expression level of the chimeric genes.

[0378] Preferably, a transcriptional termination signal is operably linked to the chimeric genes in the vectors. Generally, transcriptional termination signal sequences derived from, e.g., the CYC1 and ADH1 genes can be used.

[0379] Additionally, it is preferred that the bait vector and prey vector contain one or more selectable markers for the selection and maintenance of only those yeast cells that harbor a chimeric gene. Any selectable markers known in the art can be used for purposes of this invention so long as yeast cells expressing the chimeric gene(s) can be positively identified or negatively selected. Examples of markers that can be positively identified are those based on color assays, including the lacZ gene which encodes beta-galactosidase, the firefly luciferase gene, secreted alkaline phosphatase, horseradish peroxidase, the blue fluorescent protein (BFP), and the green fluorescent protein (GFP) gene (see Cubitt et al., Trends Biochem. Sci., 20:448-455 (1995)). Other markers emitting fluorescence, chemiluminescence, UV absorption, infrared radiation, and the like can also be used. Among the markers that can be selected are auxotrophic markers including, but not limited to, URA3, HIS3, TRP1, LEU2, LYS2, ADE2, and the like. Typically, for purposes of auxotrophic selection, the yeast host cells transformed with bait vector and/or prey vector are cultured in a.medium lacking a particular nutrient. Other selectable markers are not based on auxotrophies, but rather on resistance or sensitivity to an antibiotic or other xenobiotic. Examples of such markers include but are not limited to chloramphenicol acetyl transferase (CAT) gene, which confers resistance to chloramphenicol; CAN1 gene, which encodes an arginine permease and thereby renders cells sensitive to canavanine (see Sikorski et al., Meth. Enzymol., 194:302-318 (1991)); the bacterial kanamycin resistance gene (kan^{R}), which renders eukaryotic cells resistant to the aminoglycoside G418 (see Wach etal., Yeast, 10:1793-1808 (1994)); and CYH2 gene, which confers sensitivity to cycloheximide (see Sikorski et al., Meth. Enzymol., 194:302-318 (1991)). In addition, the CUP1 gene, which encodes metallothionein and thereby confers resistance to copper, is also a suitable selection marker. Each of the above selection markers may be used alone or in combination. One or more selection markers can be included in a particular bait or prey vector. The bait vector and prey vector may have the same or different selection markers. In addition, the selection pressure can be placed on the transformed host cells either before or after mating the haploid yeast cells.

[0380] As will be apparent, the selection markers used should complement the host strains in which the bait and/or prey vectors are expressed. In other words, when a gene is used as a selection marker gene, a yeast strain lacking the selection marker gene (or having mutation in the corresponding gene) should be used as host cells. Numerous yeast strains or derivative strains corresponding to various selection markers are known in the art. Many of them have been developed specifically for certain yeast two-hybrid systems. The application and optional modification of such strains with respect to the present invention should be apparent to a skilled artisan apprised of the present disclosure. Methods for genetically manipulating yeast strains using genetic crossing or recombinant mutagenesis are well known in the art. See e.g., Rothstein, Meth. Enzymol., 101:202-211 (1983). By way of example, the following yeast strains are well known in the art, and can be used in the present invention upon necessary modifications and adjustment:

[0381] L40 strain which has the genotype MATa his3 delta200trp1-901 leu2-3,112 ade2 LYS2::(lexAop)4-HIS3 URA3::(lexAop)8-lacZ;

[0382] EGY48 strain which has the genotype MATalpha trp1 his3 ura3 6ops-LEU2; and MaV103 strain which has the genotype MATalpha ura3-52 leu2-3,112 trp1-901 his3 delta200 ade2-101gal4delta gal80delta SPAL10::URA3 GAL1::HIS3::lys2 (see Kumar et al., J. Biol. Chem. 272:13548-13554 (1997); Vidal et al., Proc. Natl. Acad. Sci. U.S.A, 93:10315-10320 (1996)). Such strains are generally available in the research community, and can also be obtained by simple yeast genetic manipulation. See, e.g., The Yeast Two-Hybrid System, Bartel and Fields, eds., pages 173-182, Oxford University Press, New York, N.Y., 1997.

[0383] In addition, the following yeast strains are commercially available:

[0384] Y190 strain which is available from Clontech, Palo Alto, Calif. and has the genotype MATalpha gal4 gal80his3delta200trp1-901 ade2-101 ura3-52 leu2-3, 112 URA3::GAL1-lacZLYS2::GAL1-HIS3 cyh^{r}; and

[0385] YRG-2 Strain which is available from Stratagene, La Jolla, Calif. and has the genotype MATalpha ura3-52 his3-200 ade2-101 lys2-801 trp1-901 leu2-3, 112 gal4-542 gal80-538 LYS2::GAL1-HIS3 URA3::GAL1/CYC1-lacZ

[0386] In fact, different versions of vectors and host strains specially designed for yeast two-hybrid system analysis are available in kits from commercial vendors such as Clontech, Palo Alto, Calif. and Stratagene, La Jolla, Calif., all of which can be modified for use in the present invention.

5.3.1.2. Reporters

[0387] Generally, in a transcription-based two-hybrid assay, the interaction between a bait fusion protein and a prey fusion protein brings the DNA-binding domain and the transcription-activation domain into proximity forming a functional transcriptional factor, which acts on a specific promoter to drive the expression of a reporter protein. The transcription activation domain and the DNA-binding domain may be selected from various known transcriptional activators, e.g., GAL4, GCN4, ARD1, the human estrogen receptor, E. coli LexA protein, herpes simplex virus VP16 (Triezenberg et al., Genes Dev. 2:718-729 (1988)), the E. coli B42 protein (acid blob, see Gyuris et al., Cell, 75:791-803 (1993)), NF-KB p65, and the like. The reporter gene and the promoter driving its transcription typically are incorporated into a separate reporter vector. Alternatively, the host cells are engineered to contain such a promoter-reporter gene sequence in their chromosomes. Thus, the interaction or lack of interaction between two interacting protein members of a protein complex can be determined by detecting or measuring changes in the reporter in the assay system. Although the reporters and selection markers can be of similar types and used in a similar manner in the present invention, the reporters and selection markers should be carefully selected in a particular detection assay such that they are distinguishable from each other and do not interfere with each other's function.

[0388] Many different types reporters are useful in the screening assays. For example, a reporter protein may be a fusion protein having an epitope tag fused to a protein. Commonly used and commercially available epitope tags include sequences derived from, e.g., influenza virus hemagglutinin (HA), Simian Virus 5 (V5), polyhistidine (6xHis), c-myc, lacZ, GST, and the like. Antibodies specific to these epitope tags are generally commercially available. Thus, the expressed reporter can be detected using an epitope-specific antibody in an immunoassay.

[0389] In another embodiment, the reporter is selected such that it can be detected by a color-based assay. Examples of such reporters include, e.g., the lacZ protein (beta-galactosidase), the green fluorescent protein (GFP), which can be detected by fluorescence assay and sorted by flow-activated cell sorting (FACS) (See Cubitt et al., Trends Biochem. Sci., 20:448-455 (1995)), secreted alkaline phosphatase, horseradish peroxidase, the blue fluorescent protein (BFP), and luciferase photoproteins such as aequorin, obelin, mnemiopsin, and berovin (See U.S. Pat. No. 6,087,476, which is incorporated herein by reference).

[0390] Alternatively, an auxotrophic factor is used as a reporter in a host strain deficient in the auxotrophic factor. Thus, suitable auxotrophic reporter genes include, but are not limited to, URA3, HIS3, TRPI, LEU2, LYS2, ADE2, and the like. For example, yeast cells containing a mutant URA3 gene can be used as host cells (Ura⁻ phenotype). Such cells lack URA3-encoded functional orotidine-5′-phosphate decarboxylase, an enzyme required by yeast cells for the biosynthesis of uracil. As a result, the cells are unable to grow on a medium lacking uracil. However, wild-type orotidine-5′-phsphate decarboxylase catalyzes the conversion of a non-toxic compound 5-fluoroorotic acid (5-FOA) to a toxic product, 5-fluorouracil. Thus, yeast cells containing a wild-type URA3 gene are sensitive to 5-FOA and cannot grow on a medium containing 5-FOA. Therefore, when the interaction between the interacting protein members in the fusion proteins results in the expression of active orotidine-5′-phosphate decarboxylase, the Ura⁻ (Foa^{R}) yeast cells will be able to grow on a uracil deficient medium (SC-Ura plates). However, such cells will not survive on a medium containing 5-FOA. Thus, protein-protein interactions can be detected based on cell growth.

[0391] Additionally, antibiotic resistance reporters can also be employed in a similar manner. In this respect, host cells sensitive to a particular antibiotics is used. Antibiotics resistance reporters include, for example, chloramphenicol acetyl transferase (CAT) gene and the kanR gene, which confers resistance to G418 in eukaryotes and to kanamycin in prokaryotes.

5.3.1.3. Screening Assay for Dissociators

[0392] The screening assay of the present invention is useful in identifying compounds capable of interfering with or disrupting or dissociating protein-protein interaction between FHOS or a homologue or derivative thereof and a protein selected from the group consisting of GROUP1 or a homologue or derivative thereof. For example, FHOS and its interacting partners are believed to play a role in signal transduction, cytoskeleton rearrangement, membrane trafficking, cell polarity, cell movement, transcription activation or inhibition, protein synthesis and cell-cycle regulation, and thus are involved in diabetes mellitus, cardiovascular disease, hypertension, nephropathy, acute and chronic inflammatory disorders, autoimmune diseases, cell proliferative disorders, cancers and neurodegenerative disorders. It may be possible to ameliorate or alleviate the diseases or disorders in a patient by interfering with or dissociating normal interactions between FHOS and one of GROUP1. Alternatively, if the disease or disorder is associated with increased expression of FHOS and/or one of the FHOS-interacting proteins in accordance with the present invention, then the disease may be treated or prevented by weakening or dissociating the interaction between FHOS and the member in a patient. In addition, if a disease or disorder is associated with mutant forms of FHOS and/or one of the FHOS-interacting proteins that lead to strengthened protein-protein interaction therebetween, then the disease or disorder may be treated with a compound that weakens or interferes with the interaction between the mutant form of FHOS and the member.

[0393] In a screening assay for a dissociator, FHOS, a mutant form or a binding domain thereof, and an FHOS-interacting protein, or a mutant form or a binding domain thereof, are used as test proteins expressed in the form of fusion proteins as described above for purposes of a two-hybrid assay. The fusion proteins are expressed in a host cell and allowed to interact with each other in the presence of one or more test compounds.

[0394] In a preferred embodiment, a counterselectable marker is used as a reporter such that a detectable signal (e.g., appearance of color or fluorescence, or cell survival) is present only when the test compound is capable of interfering with the interaction between the two test proteins. In this respect, the reporters used in various “reverse two-hybrid systems” known in the art may be employed. Reverse two-hybrid systems are disclosed in, e.g., U.S. Pat. Nos. 5,525,490; 5,733,726; 5,885,779; Vidal etal., Proc. Natl. Acad. Sci. U.S.A, 93:10315-10320 (1996); and Vidal et al., Proc. Natl. Acad. Sci. U.S.A, 93:10321-10326 (1996), all of which are incorporated herein by reference.

[0395] Examples of suitable counterselectable reporters useful in a yeast system include the URA3 gene (encoding orotidine-5′-decarboxylase, which converts 5-fluroorotic acid (5-FOA) to the toxic metabolite 5-fluorouracil), the CAN1 gene (encoding arginine permease, which transports toxic arginine analog canavanine into yeast cells), the GAL1 gene (encoding galactokinase, which catalyzes the conversion of 2-deoxygalactose to toxic 2-deoxygalactose- 1-phosphate), the LYS2 gene (encoding alpha-aminoadipate reductase, which renders yeast cells unable to grow on a medium containing alpha-aminoadipate as the sole nitrogen source), the MET15 gene (encoding O-acetylhomoserine sulfhydrylase, which confers on yeast cells sensitivity to methyl mercury), and the CYH2 gene (encoding L29 ribosomal protein, which confers sensitivity to cycloheximide). In addition, any known cytotoxic agents including cytotoxic proteins such as the diphtheria toxin (DTA) catalytic domain can also be used as counterselectable reporters. See U.S. Pat. No. 5,733,726. DTA causes the ADP-ribosylation of elongation factor-2 and thus inhibits protein synthesis and causes cell death. Other examples of cytotoxic agents include recin, Shiga toxin, and exotoxin A of Pseudomonas aeruginosa.

[0396] For example, when the URA3 gene is used as a counterselectable reporter gene, yeast cells containing a mutant URA3 gene can be used as host cells (Ura⁻Foa^{R} phenotype) for the in vivo assay. Such cells lack URA3-encoded functional orotidine-5′-phsphate decarboxylase, an enzyme required for the biosynthesis of uracil. As a result, the cells are unable to grow on media lacking uracil. However, because of the absence of a wild-type orotidine-5′-phsphate decarboxylase, the yeast cells cannot convert non-toxic 5-fluoroorotic acid (5-FOA) to a toxic product, 5-fluorouracil. Thus, such yeast cells are resistant to 5-FOA and can grow on a medium containing 5-FOA. Therefore, for example, to screen for a compound capable of disrupting interaction between FHOS and PROTEIN2, FHOS can be expressed as a fusion protein with a DNA-binding domain of a suitable transcription activator while PROTEIN2 is expressed as a fusion protein with a transcription activation domain of a suitable transcription activator. In the host strain, the reporter URA3 gene may be operably linked to a promoter specifically responsive to the association of the transcription activation domain and the DNA-binding domain. After the fusion proteins are expressed in the Ura- Foa^{R} yeast cells, an in vivo screening assay can be conducted in the presence of a test compound with the yeast cells being cultured on a medium containing uracil and 5-FOA. If the test compound does not disrupt the interaction between FHOS and PROTEIN2, active URA3 gene product, i.e., orotidine-5′-decarboxylase, which converts 5-FOA to toxic 5-fluorouracil, is expressed. As a result, the yeast cells cannot grow. On the other hand, when the test compound disrupts the interaction between FHOS and PROTEIN2, no active orotidine-5′-decarboxylase is produced in the host yeast cells. Consequently, the yeast cells will survive and grow on the 5-FOA-containing medium. Therefore, compounds capable of interfering with or dissociating the interaction between FHOS and PROTEIN2 can thus be identified based on colony formation.

[0397] As will be apparent, the screening assay of the present invention can be applied in a format appropriate for large-scale screening. For example, combinatorial technologies can be employed to construct combinatorial libraries of small organic molecules or small peptides. See generally, e.g., Kenan et al., Trends Biochem. Sc., 19:57-64 (1994); Gallop et al., J. Med. Chem., 37:1233-1251 (1994); Gordon et al., J. Med. Chem., 37:1385-1401 (1994); Ecker et al., Biotechnology, 13:351-360 (1995). Such combinatorial libraries of compounds can be applied to the screening assay of the present invention to isolate specific modulators of particular protein-protein interactions. In the case of random peptide libraries, the random peptides can be co-expressed with the fusion proteins of the present invention in host cells and assayed in vivo. See e.g., Yang et al., Nucl. Acids Res., 23:1152-1156 (1995). Alternatively, they can be added to the culture medium for uptake by the host cells.

[0398] Conveniently, yeast mating is used in an in vivo screening assay. For example, haploid cells of alpha-mating type expressing one fusion protein as described above are mated with haploid cells of a-mating type expressing the other fusion protein. Upon mating, the diploid cells are spread on a suitable medium to form a lawn. Drops of test compounds can be deposited onto different areas of the lawn. After culturing the lawn for an appropriate period of time, drops containing a compound capable of modulating the interaction between the particular test proteins in the fusion proteins can be identified by stimulation or inhibition of growth in the vicinity of the drops.

[0399] The screening assays of the present invention for identifying compounds capable of modulating protein-protein interactions can also be fine-tuned by various techniques to adjust the thresholds or sensitivity of the positive and negative selections. Mutations can be introduced into the reporter proteins to adjust their activities. The uptake of test compounds by the host cells can also be adjusted. For example, yeast high uptake mutants such as the erg6 mutant strains can facilitate yeast uptake of the test compounds. See Gaber et al., Mol. Cell. Biol., 9:3447-3456 (1989). Likewise, the uptake of the selection compounds such as 5-FOA, 2-deoxygalactose, cycloheximide, alpha-aminoadipate, and the like can also be fine-tuned.

5.3.1.4. Screening Assay for Enhancers

[0400] The screening assay of the present invention can also be used in identifying compounds that trigger or initiate, enhance or stabilize protein-protein interaction between FHOS or a mutant thereof and a protein selected from the group consisting of GROUP1 or a mutant thereof. For example, if a disease or disorder is associated with decreased expression of FHOS and/or a member of selected from the group of GROUP1, then the disease or disorder may be treated or prevented by strengthening or stabilizing the interaction between FHOS and the FHOS-interacting member in a patient. Alternatively, if a disease or disorder is associated with mutant forms of FHOS and/or an FHOS-interacting protein that lead to weakened or abolished protein-protein interaction therebetween, then the disease or disorder may be treated with a compound that initiates or stabilizes the interaction between the mutant forms of FHOS and/or the FHOS-interacting protein.

[0401] Thus, a screening assay can be performed in the same manner as described above, except that a positively selectable marker is used. For example, FHOS or a mutant form or a binding domain thereof, and a protein selected from the group consisting of GROUP1, or a mutant form or a binding domain thereof, are used as test proteins expressed in the form of fusion proteins as described above for purposes of a two-hybrid assay. The fusion proteins are expressed in a host cell and allowed to interact with each other in the presence of one or more test compounds.

[0402] A gene encoding a positively selectable marker such as the lacZ protein may be used as a reporter gene such that when a test compound enables or enhances the interaction between FHOS, or a mutant form or a binding domain thereof, and a protein selected from the group consisting of GROUP1 or a mutant form or a binding domain thereof, the lacZ protein, i.e., beta-galactosidase is expressed. As a result, the compound may be identified based on the appearance of a blue color when the host cells are cultured in a medium containing X-Gal.

[0403] Optionally, a control assay is performed in which the above screening assay is conducted in the absence of the test compound. The result is then compared with that obtained in the presence of the test compound.

5.4. Optimization of the Identified Compounds

[0404] Once an effective compound is identified, structural analogs or mimetics thereof can be produced based on rational drug design with the aim of improving drug efficacy and stability, and reducing side effects. Methods known in the art for rational drug design can be used in the present invention. See, e.g., Hodgson et al., Bio/Technology, 9:19-21 (1991); U.S. Pat. Nos. 5,800,998 and 5,891,628, all of which are incorporated herein by reference. An example of rational drug design is the development of HIV protease inhibitors. See Erickson et al., Science, 249:527-533 (1990).

[0405] Preferably, structural information on the protein-protein interaction to be modulated is obtained. For example, each of the interacting pair can be expressed and purified. The purified interacting protein pairs are then allowed to interact with each other in vitro under appropriate conditions. Optionally, the interacting protein complex can be stabilized by crosslinking or other techniques. The interacting complex can be studied using various biophysics techniques including, e.g., X-ray crystallography, NMR, computer modeling, mass spectrometry, and the like. Likewise, structural information can also be obtained from protein complexes formed by interacting proteins and a compound that initiates or stabilizes the interaction of the proteins.

[0406] In addition, understanding of the interaction between the proteins of interest in the presence or absence of a modulator can also be derived from mutagenesis analysis using yeast two-hybrid system or other methods for detection protein-protein interaction. In this respect, various mutations can be introduced into the interacting proteins and the effect of the mutations on protein-protein interaction is examined by a suitable method such as the yeast two-hybrid system.

[0407] Various mutations including amino acid substitutions, deletions and insertions can be introduced into a protein sequence using conventional recombinant DNA technologies. Generally, it is particularly desirable to decipher the protein binding sites. Thus, it is important that the mutations introduced only affect protein-protein interaction and cause minimal structural disturbances. Mutations are preferably designed based on knowledge of the three-dimensional structure of the interacting proteins. Preferably, mutations are introduced to alter charged amino acids or hydrophobic amino acids exposed on the surface of the proteins, since ionic interactions and hydrophobic interactions are often involved in protein-protein interactions. Alternatively, the “alanine scanning mutagenesis” technique is used. See Wells, et al., Methods Enzymol., 202:301-306 (1991); Bass et al., Proc. Natl. Acad. Sci. U.S.A, 88:4498-4502 (1991); Bennet et al., J. Biol. Chem., 266:5191-5201 (1991); Diamond et al., J. Virol., 68:863-876 (1994). Using this technique, charged or hydrophobic amino acid residues of the interacting proteins are replaced by alanine, and the effect on the interaction between the proteins is analyzed using e.g., the yeast two-hybrid system. For example, the entire protein sequence can be scanned in a window of five amino acids. When two or more charged or hydrophobic amino acids appear in a window, the charged or hydrophobic amino acids are changed to alanine using standard recombinant DNA techniques. The thus mutated proteins are used as “test proteins” in the above-described two-hybrid assay to examine the effect of the mutations on protein-protein interaction. Preferably, the mutagenesis analysis is conducted both in the presence and in the absence of an identified modulator compound. In this manner, the domains or residues of the proteins important to protein-protein interaction and/or the interaction between the modulator compound and the proteins can be identified.

[0408] Based on the structural information obtained, structural relationships between the interacting proteins as well as between the identified compound and the interacting proteins are elucidated. The moieties and the three-dimensional structure of the identified compound, i.e., lead compound, critical to its modulating effect on the interaction of the proteins of interest are revealed. Medicinal chemists can then design analog compounds having similar moieties and structures.

[0409] In addition, an identified peptide compound capable of modulating particular protein-protein interactions can also be analyzed by the alanine scanning technique and/or the two-hybrid assay to determine the domains or residues of the peptide important to its modulating effect on particular protein-protein interactions. The peptide compound can be used as a lead molecule for rational design of small organic molecules or peptide mimetics. See Huber et al., Curr. Med. Chem., 1:13-34 (1994).

[0410] The residues or domains critical to the modulating effect of the identified compound constitute the active region of the compound known as its “pharmacophore.” Once the pharmacophore has been elucidated, a structural model can be established by a modeling process that may incorporate data from NMR analysis, X-ray diffraction data, alanine scanning, spectroscopic techniques and the like. Various techniques including computational analysis, similarity mapping and the like can all be used in this modeling process. See e.g., Perry et al., in OSAR: Quantitative Structure-Activity Relationships in Drug Design, pp. 189-193, Alan R. Liss, Inc., 1989; Rotivinen et al., Acta Pharmaceutical Fennica, 97:159-166 (1988); Lewis et al., Proc. R. Soc. Lond., 236:125-140 (1989); McKinaly et al., Annu. Rev. Pharmacol. Toxiciol., 29:111-122 (1989). Commercial molecular modeling systems available from Polygen Corporation, Waltham, Mass., include the CHARMm program, which performs the energy minimization and molecular dynamics functions, and QUANTA program which performs the construction, graphic modeling and analysis of molecular structure. Such programs allow interactive construction, visualization and modification of molecules. Other computer modeling programs are also available from BioDesign, Inc. (Pasadena, Calif.), Hypercube, Inc. (Cambridge, Ontario), and Allelix, Inc. (Mississauga, Ontario, Canada).

[0411] A template can be formed based on the established model. Various compounds can then be designed by linking various chemical groups or moieties to the template. Various moieties of the template can also be replaced. In addition, in the case of a peptide lead compound, the peptide or mimetics thereof can be cyclized, e.g., by linking the N-terminus and C-terminus together, to increase its stability. These rationally designed compounds are further tested. In this manner, pharmacologically acceptable and stable compounds with improved efficacy and reduced side effect can be developed. The compounds identified in accordance with the present invention can be incorporated into a pharmaceutical formulation suitable for administration to an individual.

6. Therapeutic Applications

[0412] As described above, the interactions between FHOS and the FHOS-interacting proteins suggest that these proteins and/or the protein complexes formed by such proteins may be involved in the same biological processes and disease pathways. Thus, one may modulate such biological processes by modulating the functions and activities of FHOS, an FHOS-interacting protein, and a protein complex formed by the proteins. As used herein, modulating the functions or activities of FHOS, an FHOS-interacting protein, and a protein complex formed by the proteins means causing any forms of alteration of the properties, biological activities or functions of the proteins or protein complexes, including, e.g., increasing the levels of FHOS, an FHOS-interacting protein or a protein complex formed by the proteins, enhancing or reducing their biological activities, increasing or decreasing their stability, altering their affinity or specificity to certain other biological molecules, etc. For example, an FHOS-containing protein complex of the present invention or its members thereof may be involved in signal transduction, cytoskeleton rearrangement, membrane trafficking, cell polarity, cell movement, transcription activation or inhibition, protein synthesis and cell-cycle regulation. Thus, assays such as those described in Section 4 may be used in determining the effect of an aberration in a particular FHOS-containing complex or an interacting member thereof on signal transduction, cytoskeleton rearrangement, membrane trafficking, cell polarity, cell movement, transcription activation or inhibition, protein synthesis and cell-cycle regulation. In addition, it is also possible to determine, using the same assay methods, the presence or absence of an association between an FHOS-containing complex or an interacting member thereof and a physiological disorder or disease such as diabetes mellitus, cardiovascular disease, hypertension, nephropathy, acute and chronic inflammatory disorders, autoimmune diseases, cell proliferative disorders, cancers and neurodegenerative disorders or predisposition to the physiological disorder or disease.

[0413] Once such associations are established, the diagnostic methods as described in Section 4 can be used in diagnosing the disease or disorder. In addition, various in vitro and in vivo assays may be employed to test the therapeutic or prophylactic efficacies of the various therapeutic approaches described in Sections 6.2 and 6.3 which are aimed to modulate the functions and activities of a particular FHOS-containing complex of the present invention or an interacting member thereof. Similar assays can also be used to test whether the therapeutic approaches described in Sections 6.2 and 6.3 result in the modulation of signal transduction, cytoskeleton rearrangement, membrane trafficking, cell polarity, cell movement, transcription activation or inhibition, protein synthesis and cell-cycle regulation. The cell model or transgenic animal model described in Section 7 may be employed in the in vitro and in vivo assays.

6.1. Applicable Diseases

[0414] The method for modulating the function and activities of FHOS-containing protein complexes of the present invention or interacting members thereof may be employed to modulate signal transduction, cytoskeleton rearrangement, membrane trafficking, cell polarity, cell movement, transcription activation or inhibition, protein synthesis and cell-cycle regulation.

[0415] In addition, the methods may also be used in the treatment or prevention of diabetes mellitus, cardiovascular disease, hypertension, nephropathy, acute and chronic inflammatory disorders, autoimmune diseases, cell proliferative disorders, cancers and neurodegenerative disorders.

6.2. Inhibiting Protein Complex or Interacting Protein Members Thereof

[0416] In one aspect of the present invention, methods are provided for reducing in a patient the level and/or activity of a protein complex identified in accordance with the present invention which comprises FHOS and a member of the GROUP1. In addition, methods are also provided for reducing in a patient the level and/or activity of an FHOS-interacting protein selected from the GROUP1. By reducing the protein complex and/or the FHOS-interacting protein level and/or inhibiting the functional activities of the protein complex and/or the FHOS-interacting protein, the diseases involving such protein complex or FHOS-interacting protein may be treated or prevented.

6.2.1. Antibody Therapy

[0417] In one embodiment, an antibody may be administered to a patient. The antibody administered may be immunoreactive with FHOS or a member of the GROUP1. Suitable antibodies may be monoclonal or polyclonal that fall within any antibody classes, e.g., IgG, IgM, IgA, etc. The antibody suitable for this invention may also take a form of various antibody fragments including, but not limited to, Fab and F(ab′)₂, single-chain fragments (scFv), and the like. In one embodiment, an antibody selectively immunoreactive with the protein complex formed from FHOS and an FHOS-interacting protein in accordance with the present invention is administered to a patient. In another embodiment, an antibody specific to an FHOS-interacting protein selected from the GROUP1 is administered to a patient. Methods for making the antibodies of the present invention should be apparent to a person of skill in the art, especially in view of the discussions in Section 3 above. The antibodies can be administered in any suitable form and route as described in Section 8 below. Preferably, the antibodies are administered in a pharmaceutical composition together with a pharmaceutically acceptable carrier.

[0418] Alternatively, the antibodies may be delivered by a gene-therapy approach. That is, nucleic acids encoding the antibodies, particularly single-chain fragments (scFv), may be introduced into a patient such that desirable antibodies may be produced recombinantly in vivo from the nucleic acids. For this purpose, the nucleic acids with appropriate transcriptional and translation regulatory sequences can be directly administered into the patient. Alternatively, the nucleic acids can be incorporated into a suitable vector as described in Sections 2.2 and 5.3.1.1 and delivered into a patient along with the vector. The expression vector containing the nucleic acids can be administered directly to a patient. It can also be introduced into cells, preferably cells derived from a patient to be treated, and subsequently delivered into the patient by cell transplantation. See Section 6.3.2 below.

6.2.2. Antisense Therapy

[0419] In another embodiment, antisense compounds specific to nucleic acids encoding one or more interacting protein members of a protein complex identified in the present invention is administered to a patient to be therapeutically or prophylactically treated. The antisense compounds should specifically inhibit the expression of the one or more interacting protein members. As is known in the art, antisense drugs generally act by hybridizing to a particular target nucleic acid thus blocking gene expression. Methods for designing antisense compounds and using such compounds in treating diseases are well known and well developed in the art. For example, the antisense drug Vitravene® (fomivirsen), a 21-base long oligonucleotide, has been successfully developed and marketed by Isis Pharmaceuticals, Inc. for treating cytomegalovirus (CMV)-induced retinitis.

[0420] Any methods for designing and making antisense compounds may be used for purpose of the present invention. See generally, Sanghvi et al., eds., Antisense Reseach and Applications, CRC Press, Boca Raton, 1993. Typically, antisense compounds are oligonucleotides designed based on the nucleotide sequence of the mRNA or gene of one or more of the interacting protein members of a particular protein complex of the present invention. In particular, antisense compounds can be designed to specifically hybridize to a particular region of the gene sequence or mRNA of one or more of the interacting protein members to modulate (increase or decrease), replication, transcription, or translation. As used herein, the term “specifically hybridize” or paraphrases thereof means a sufficient degree of complementarity or pairing between an antisense oligo and a target DNA or mRNA such that stable and specific binding occurs therebetween. In particular, 100% complementary or pairing is not required. Specific hybridization takes place when sufficient hybridization occurs between the antisense compound and its intended target nucleic acids in substantially absence of non-specific binding of the antisense compound to non-target sequences under predetermined conditions, e.g., for purposes of in vivo treatment, preferably under physiological conditions. Preferably, specific hybridization results in the interference with normal expression of the target DNA or mRNA.

[0421] For example, an antisense oligo can be designed to specifically hybridize to the replication or transcription regulatory regions of a target gene, or the translation regulatory regions such as translation initiation region and exon/intron junctions, or the coding regions of a target mRNA.

[0422] As is generally known in the art, commonly used oligonucleotides are oligomers or polymers of ribonucleic acid or deoxyribonucleic acid having a combination of naturally-occurring nucleoside bases, sugars and covalent linkages between nucleoside bases and sugars including a phosphate group. However, it is noted that the term “oligonucleotides” also encompasses various non-naturally occurring mimetics and derivatives, i.e., modified forms, of naturally-occurring oligonucleotides as described below. Typically an antisense compound of the present invention is an oligonucleotide having from about 6 to about 200, preferably from about 8 to about 30 nucleoside bases.

[0423] The antisense compounds preferably contain modified backbones or non-natural intemucleoside linkages, including but not limited to, modified phosphorous-containing backbones and non-phosphorous backbones such as morpholino backbones; siloxane, sulfide, sulfoxide, sulfone, sulfonate, sulfonamide, and sulfamate backbones; formacetyl and thioformacetyl backbones; alkene-containing backbones; methyleneimino and methylenehydrazino backbones; amide backbones, and the like.

[0424] Examples of modified phosphorous-containing backbones include, but are not limited to phosphorothioates, phosphorodithioates, chiral phosphorothioates, phosphotriesters, aminoalkylphosphotriesters, alkyl phosphonates, thionoalkylphosphonates, phosphinates, phosphoramidates, thionophosphoramidates, thionoalkylphosphotriesters, and boranophosphates and various salt forms thereof. See e.g., U.S. Pat. Nos. 3,687,808; 4,469,863; 4,476,301; 5,023,243; 5,177,196; 5,188,897; 5,264,423; 5,276,019; 5,278,302; 5,286,717; 5,321,131; 5,399,676; 5,405,939; 5,453,496; 5,455,233; 5,466,677; 5,476,925; 5,519,126; 5,536,821; 5,541,306; 5,550,111; 5,563,253; 5,571,799; 5,587,361; and 5,625,050, each of which is herein incorporated by reference.

[0425] Examples of the non-phosphorous containing backbones described above are disclosed in, e.g., U.S. Pat. Nos. 5,034,506; 5,185,444; 5,214,134; 5,216,141, 5,235,033; 5,264,562; 5,264,564; 5,405,938; 5,434,257; 5,470,967; 5,489,677; 5,541,307; 5,561,225; 5,596,086; 5,610,289; 5,602,240; 5,608,046; 5,610,289; 5,618,704; 5,623,070; 5,663,312; 5,677,437; and 5,677,439, each of which is herein incorporated by reference.

[0426] Another useful modified oligonucleotide is peptide nucleic acid (PNA), in which the sugar-backbone of an oligonucleotide is replaced with an amide containing backbone, e.g., an aminoethylglycine backbone. See U.S. Pat. Nos. 5,539,082 and 5,714,331; and Nielsen et al., Science, 254, 1497-1500 (1991), all of which are incorporated herein by reference. PNA antisense compounds are resistant to RNAse H digest and thus exhibit longer half-life. In addition, various modifications may be made in PNA backbones to impart desirable drug profiles such as better stability, increased drug uptake, higher affinity to target nucleic acid, etc.

[0427] Alternatively, the antisense compounds are oligonucleotides containing modified nucleosides, i.e., modified purine or pyrimidine bases, e.g., 5-substituted pyrimidines, 6-azapyrimidines, and N-2, N-6 and O-substituted purines, and the like. See e.g., U.S. Pat. Nos. 3,687,808; 4,845,205; 5,130,302; 5,175,273; 5,367,066; 5,432,272; 5,459,255; 5,484,908; 5,502,177; 5,525,711; 5,587,469; 5,594,121; 5,596,091; 5,681,941; and 5,750,692, each of which is incorporated herein by reference in its entirety.

[0428] In addition, oligonucleotides with substituted or modified sugar moieties may also be used. For example, an antisense compound may have one or more 2′-O-methoxyethyl sugar moieties. See e.g., U.S. Pat. Nos. 4,981,957; 5,118,800; 5,319,080; 5,393,878; 5,446,137; 5,466,786; 5,514,785; 5,567,811; 5,576,427; 5,591,722; 5,610,300; 5,627,0531 5,639,873; 5,646,265; 5,658,873; 5,670,633; and 5,700,920, each of which is herein incorporated by reference.

[0429] Other types of oligonucleotide modifications are also useful including linking an oligonucleotide to a lipid, phospholipid or cholesterol moiety, cholic acid, thioether, aliphatic chain, polyamine, polyethylene glycol (PEG), or a protein or peptide. The modified oligonucleotides may exhibit increased uptake into cells, improved stability, i.e., resistance to nuclease digestion and other biodegradations. See e.g., U.S. Pat. No. 4,522,811; Burnham, Am. J Hosp. Pharm., 15:210-218 (1994).

[0430] Antisense compounds can be synthesized using any suitable methods known in the art. In fact, antisense compounds may be custom made by commercial suppliers. Alternatively, antisense compounds may be prepared using DNA synthesizers commercially from various vendors, e.g., Applied Biosystems Group of Norwalk, Conn.

[0431] The antisense compounds can be formulated into a pharmaceutical composition with suitable carriers and administered into a patient using any suitable route of administration. Alternatively, the antisense compounds may also be used in a “gene-therapy” approach. That is, the oligonucleotide is subcloned into a suitable vector and transformed into human cells. The antisense oligonucleotide is then produced in vivo through transcription. Methods for gene therapy are disclosed in Section 6.3.2 below.

6.2.3. Ribozyme Therapy

[0432] In another embodiment, an enzymatic RNA or ribozyme is designed to target the nucleic acids encoding one or more of the interacting protein members of the protein complex of the present invention. Ribozymes are RNA molecules, which have an enzymatic activity and are capable of repeatedly cleaving other separate RNA molecules in a nucleotide base sequence specific manner. See Kim et al., Proc. Natl. Acad of Sci. U.S.A, 84:8788 (1987); Haseloff and Gerlach, Nature, 334:585 (1988); and Jefferies et al., Nucleic Acid Res., 17:1371 (1989). A ribozyme typically has two portions: a catalytic portion and a binding sequence that guides the binding of ribozymes to a target RNA through complementary base-pairing. Once the ribozyme is bound to a target RNA, it enzymatically cleaves the target RNA, typically destroying its ability to direct translation of an encoded protein. After a ribozyme has cleaved its RNA target, it is released from that target RNA and thereafter can bind and cleave another target. That is, a single ribozyme molecule can repeatedly bind and cleave new targets. Therefore, one advantage of ribozyme treatment is that a lower amount of exogenous RNA is required as compared to conventional antisense therapies. In addition, ribozymes exhibit less affinity to mRNA targets than DNA-based antisense oligos, and therefore are less prone to bind to wrong targets.

[0433] In accordance with the present invention, a ribozyme may target any portions of the mRNA of one or more interacting protein members including FHOS, and GROUP1. Methods for selecting a ribozyme target sequence and designing and making ribozymes are generally known in the art. See e.g., U.S. Pat. Nos. 4,987,071; 5,496,698; 5,525,468; 5,631,359; 5,646,020; 5,672,511; and 6,140,491, each of which is incorporated herein by reference in its entirety. For example, suitable ribozymes may be designed in various configurations such as hammerhead motifs, hairpin motifs, hepatitis delta virus motifs, group I intron motifs, or RNase P RNA motifs. See e.g., U.S. Pat. Nos.4,987,071; 5,496,698; 5,525,468; 5,631,359; 5,646,020; 5,672,511; and 6,140,491; Rossi et al., AIDS Res. Human Retroviruses 8:183 (1992); Hampel and Tritz, Biochemistry 28:4929 (1989); Hampel et al., Nucleic Acids Res., 18:299 (1990); Perrotta and Been, Biochemistry 31:16 (1992); and Guerrier-Takada et al., Cell, 35:849 (1983).

[0434] Ribozymes can be synthesized by the same methods used for normal RNA synthesis. For example, such methods are disclosed in Usman et al., J. Am. Chem. Soc., 109:7845-7854 (1987) and Scaringe et al., Nucleic Acids Res., 18:5433-5441 (1990). Modified ribozymes may be synthesized by the methods disclosed in, e.g., U.S. Pat. No. 5,652,094; International Publication Nos. WO 91/03162; WO 92/07065 and WO 93/15187; European Pat. Application No. 92110298.4; Perrault et al., Nature, 344:565 (1990); Pieken et al., Science, 253:314 (1991); and Usman and Cedergren, Trends in Biochem. Sci., 17:334 (1992).

[0435] Ribozymes of the present invention may be administered to cells by any known methods, e.g., disclosed in International Publication No. WO 94/02595. For example, they can be administered directly to a patient through any suitable route, e.g., intravenous injection. Alternatively, they may be delivered in encapsulation in liposomes, by iontophoresis, or by incorporation into other vehicles such as hydrogels, cyclodextrins, biodegradable nanocapsules, and bioadhesive microspheres. In addition, they may also be delivered by gene therapy approach, using a DNA vector from which the ribozyme RNA can be transcribed directly. Gene therapy methods are disclosed in detail below in Section 6.3.2.

6.2.4. Other Methods

[0436] The patient level and activity of a particular protein complex and the interacting protein members thereof identified in accordance with the present invention may also be inhibited by various other methods. For example, compounds identified in accordance with the methods described in Section 5 that are capable of interfering with or dissociating protein-protein interactions between the interacting protein members of a protein complex may be administered to a patient. Compounds identified in in vitro binding assays described in Section 5.2 that bind to the FHOS-containing protein complex or the interacting members thereof may also be used in the treatment. In addition, useful agents also include incomplete proteins, i.e., fragments of the interacting protein members that are capable of binding to their respective binding partners in a protein complex but are defective of its normal cellular functions. For example, binding domains of the interacting member proteins of a protein complex may be used as competitive inhibitors of the activities of the protein complex. As will be apparent to skilled artisans, derivatives or homologues of the binding domains may also be used.

[0437] In yet another embodiment, the gene therapy methods discussed in Section 6.2.2 below are used to “knock out” the gene encoding an interacting protein member of a protein complex, or to reduce the gene expression level. For example, the gene may be replaced with a different gene sequence or a non-functional sequence or simply deleted by homologous recombination. In another gene therapy embodiment, the method disclosed in U.S. Pat. No. 5,641,670, which is incorporated herein by reference, may be used to reduce the expression of the genes for the interacting protein members. Essentially, an exogenous DNA having at least a regulatory sequence, an exon and a splice donor site can be introduced into an endogenous gene encoding an interacting protein member by homologous recombination such that the regulatory sequence, the exon and the splice donor site present in the DNA construct become operatively linked to the endogenous gene. As a result, the expression of the endogenous gene is controlled by the newly introduced exogenous regulatory sequence. Therefore, when the exogenous regulatory sequence is a strong gene expression repressor, the expression of the endogenous gene encoding the interacting protein member is reduced or blocked. See U.S. Pat. No. 5,641,670.

6.3. Activating Protein Complex or Interacting Protein Members Thereof

[0438] The present invention also provides methods for increasing in a patient the level and/or activity of a protein complex or of an individual protein member thereof identified in accordance with the present invention. Such methods can be particularly useful in instances where a reduced level and/or activity of a protein complex or a protein member thereof are associated with a particular disease or disorder to be treated, or where an increased level and/or activity of a protein complex or a protein member thereof would be beneficial to the improvement of a cellular function or disease state. By increasing the level of the protein complex or a protein member thereof, and/or stimulating the functional activities of the protein complex or a protein member thereof, the disease or disorder may be treated or prevented.

6.3.1. Administration of Protein Complex or Protein Members Thereof

[0439] Where the level or activity of a particular FHOS-containing protein complex or an FHOS-interacting protein of the present invention in a patient is determined to be low or is desired to be increased, the protein complex or the FHOS-interacting protein may be administered directly to the patient to increase the level and/or activity of the protein complex or the FHOS-interacting protein. For this purpose, protein complexes prepared by any one of the methods described in Section 2.2 may be administered to the patient, preferably in a pharmaceutical composition as described below. Alternatively, one or more individual interacting protein members of the protein complex may also be administered to the patient in need of treatment. For example, one or more proteins such as FHOS, GROUP1 may be given to a patient. Proteins isolated or purified from normal individuals or recombinantly produced can all be used in this respect. Preferably, two or more interacting protein members of a protein complex are administered. The proteins or protein complexes may be administered to a patient needing treatment in any methods described in Section 8.

6.3.2. Gene Therapy

[0440] In another embodiment, the patient level and/or activity of a particular FHOS-containing protein complex or an FHOS-interacting protein member thereof (selected from the group of GROUP1) is increased or restored by the gene therapy approach. For example, nucleic acids encoding one or more protein members of an FHOS-containing protein complex of the present invention, or portions or fragments of the protein members are introduced into tissue cells of a patient needing treatment such that the one or more protein members are expressed from the introduced nucleic acids. For this purposes, nucleic acids encoding one or more of FHOS, GROUP1, or fragments, homologues or derivatives thereof can be used in the gene therapy in accordance with the present invention. For example, if a disease-causing mutation exists in one of the protein members of a patient, then a nucleic acid encoding a wild-type protein can be introduced into tissue cells of the patient. The exogenous nucleic acid can be used to replace the corresponding endogenous defective gene by, e.g., homologous recombination. See U.S. Pat. No. 6,010,908, which is incorporated herein by reference. Alternatively, if the disease-causing mutation is a recessive mutation, the exogenous nucleic acid is simply used to express a wild-type protein in addition to the endogenous mutant protein. In another approach, the method disclosed in U.S. Pat. No. 6,077,705 may be employed in gene therapy. That is, the patient is administered both a nucleic acid construct encoding a ribozyme and a nucleic acid construct comprising a ribozyme resistant gene encoding a wild type form of the gene product. As a result, undesirable expression of the endogenous gene is inhibited and a desirable wild-type exogenous gene is introduced. In yet another embodiment, if the endogenous gene is of wild-type and the level of expression of the protein encoded thereby is desired to be increased, additional copies of wild-type exogenous genes may be introduced into the patient by gene therapy, or alternatively, a gene activation method such as that disclosed in U.S. Pat. No. 5,641,670 may be used.

[0441] Various gene therapy methods are well known in the art. Successes in gene therapy have been reported recently. See e.g., Kay et al., Nature Genet., 24:257-61 (2000); Cavazzana-Calvo et al., Science, 288:669 (2000); and Blaese et al., Science, 270: 475 (1995); Kantoff, et al., J. Exp. Med. 166:219 (1987).

[0442] Any suitable gene therapy methods may be used for purposes of the present invention. Generally, a nucleic acid encoding a desirable protein, e.g., one selected from FHOS, GROUP1 is incorporated into a suitable expression vector and is operably linked to a promoter in the vector. Suitable promoters include but are not limited to viral transcription promoters derived from adenovirus, simian virus 40 (SV40) (e.g., the early and late promoters of SV40), Rous sarcoma virus (RSV), and cytomegalovirus (CMV) (e.g., CMV immediate-early promoter), human immunodeficiency virus (HIV) (e.g., long terminal repeat (LTR)), vaccinia virus (e.g., 7.5K promoter), and herpes simplex virus (HSV) (e.g., thymidine kinase promoter). Where tissue-specific expression of the exogenous gene is desirable, tissue-specific promoters may be operably linked to the exogenous gene. In addition, selection markers may also be included in the vector for purposes of selecting, in vitro, those cells that contain the exogenous gene. Various selection markers known in the art may be used including, but not limited to, e.g., genes conferring resistance to neomycin, hygromycin, zeocin, and the like.

[0443] In one embodiment, the exogenous nucleic acid (gene) is incorporated into a plasmid DNA vector. Many commercially available expression vectors may be useful for the present invention, including, e.g., pCEP4, pcDNAI, pIND, pSecTag2, pVAX 1, pcDNA3.1, and pBI-EGFP, and pDisplay.

[0444] Various viral vectors may also be used. Typically, in a viral vector, the viral genome is engineered to eliminate the disease-causing capability, e.g., the ability to replicate in the host cells. The exogenous nucleic acid to be introduced into a patient may be incorporated into the engineered viral genome, e.g., by inserting it into a viral gene that is non-essential to the viral infectivity. Viral vectors are convenient to use as they can be easily introduced into tissue cells by way of infection. Once in the host cell, the recombinant virus typically is integrated into the genome of the host cell. In rare instances, the recombinant virus may also replicate and remain as extrachromosomal elements.

[0445] A large number of retroviral vectors have been developed for gene therapy. These include vectors derived from oncoretroviruses (e.g., MLV), lentiviruses (e.g., HIV and SIV) and other retroviruses. For example, gene therapy vectors have been developed based on murine leukemia virus (See, Cepko, et al., Cell, 37:1053-1062 (1984), Cone and Mulligan, Proc. Natl. Acad. Sci. U.S.A., 81:6349-6353 (1984)), mouse mammary tumor virus (See, Salmons et al., Biochem. Biophys. Res. Commun.,159:1191-1198 (1984)), gibbon ape leukemia virus (See, Miller et al., J. Virology, 65:2220-2224 (1991)), HIV, (See Shimada et al., J. Clin. Invest., 88:1043-1047 (1991)), and avian retroviruses (See Cosset et al., J. Virology, 64:1070-1078 (1990)). In addition, various retroviral vectors are also described in U.S. Pat. Nos. 6,168,916; 6,140,111; 6,096,534; 5,985,655; 5,911,983; 4,980,286; and 4,868,116, all of which are incorporated herein by reference.

[0446] Adeno-associated virus (AAV) vectors have been successfully tested in clinical trials. See e.g., Kay et al., Nature Genet. 24:257-61 (2000). AAV is a naturally occurring defective virus that requires other viruses such as adenoviruses or herpes viruses as helper viruses. See Muzyczka, Curr. Top. Microbiol. Immun., 158:97 (1992). A recombinant AAV virus useful as a gene therapy vector is disclosed in U.S. Pat. No. 6,153,436, which is incorporated herein by reference.

[0447] Adenoviral vectors can also be useful for purposes of gene therapy in accordance with the present invention. For example, U.S. Pat. No. 6,001,816 discloses an adenoviral vector, which is used to deliver a leptin gene intravenously to a mammal to treat obesity. Other recombinant adenoviral vectors may also be used, which include those disclosed in U.S. Pat. Nos. 6,171,855; 6,140,087; 6,063,622; 6,033,908; and 5,932,210, and Rosenfeld et al., Science, 252:431434 (1991); and Rosenfeld et al., Cell, 68:143-155 (1992).

[0448] Other useful viral vectors include recombinant hepatitis viral vectors (See, e.g., U.S. Pat. No. 5,981,274), and recombinant entomopox vectors (See, e.g., U.S. Pat. Nos. 5,721,352 and 5,753,258).

[0449] Other non-traditional vectors may also be used for purposes of this invention. For example, International Publication No. WO 94/18834 discloses a method of delivering DNA into mammalian cells by conjugating the DNA to be delivered with a polyelectrolyte to form a complex. The complex may be microinjected into or uptaken by cells.

[0450] The exogenous gene fragment or plasmid DNA vector containing the exogenous gene may also be introduced into cells by way of receptor-mediated endocytosis. See e.g., U.S. Pat. No. 6,090,619; Wu and Wu, J. Biol. Chem., 263:14621 (1988); Curiel et al., Proc. Natl. Acad. Sci. U.S.A, 88:8850 (1991). For example, U.S. Pat. No. 6,083,741 discloses introducing an exogenous nucleic acid into mammalian cells by associating the nucleic acid to a polycation moiety (e.g., poly-L-lysine having 3-100 lysine residues), which is itself coupled to an integrin receptor binding moiety (e.g., a cyclic peptide having the sequence RGD).

[0451] Alternatively, the exogenous nucleic acid or vectors containing it can also be delivered into cells via amphiphiles. See e.g., U.S. Pat. No. 6,071,890. Typically, the exogenous nucleic acid or a vector containing the nucleic acid forms a complex with the cationic amphiphile. Mammalian cells contacted with the complex can readily take the complex up.

[0452] The exogenous gene can be introduced into a patient for purposes of gene therapy by various methods known in the art. For example, the exogenous gene sequences alone or in a conjugated or complex form described above, or incorporated into viral or DNA vectors, may be administered directly by injection into an appropriate tissue or organ of a patient. Alternatively, catheters or like devices may be used for delivery into a target organ or tissue. Suitable catheters are disclosed in, e.g., U.S. Pat. Nos. 4,186,745; 5,397,307; 5,547,472; 5,674,192; and 6,129,705, all of which are incorporated herein by reference.

[0453] It is preferred that these vectors be administered in a pharmaceutically acceptable carrier for injection such as a sterile aqueous solution or dispersion, preferably isotonic. Dose and duration of treatment is determined individually depending on the degree and rate of improvement. Such determinations are performed routinely by physicians in the art.

[0454] In addition, the exogenous gene or vectors containing the gene can be introduced into isolated cells using any known techniques such as calcium phosphate precipitation, microinjection, lipofection, electroporation, gene gun, receptor-mediated endocytosis, and the like. Cells expressing the exogenous gene may be selected and redelivered back to the patient by, e.g., injection or cell transplantation. The appropriate amount of cells delivered to a patient will vary with patient conditions, and desired effect, which can be determined by a skilled artisan. See e.g., U.S. Pat. Nos. 6,054,288; 6,048,524; and 6,048,729. Preferably, the cells used are autologous, i.e., cells obtained from the patient being treated.

6.3.3. Small Organic Compounds

[0455] Defective conditions or disorders in a patient associated with decreased level or activity of an FHOS-containing protein complex or an FHOS-interacting protein identified in accordance with the present invention can also be ameliorated by administering to the patient a compound identified by the methods described in Sections 5.3.1.4, 5.2, and Section 5.4, which is capable of modulating the functions of the protein complex or the FHOS-interacting protein, e.g., by triggering or initiating, enhancing or stabilizing protein-protein interaction between the interacting protein members of the protein complex, or the mutant forms of such interacting protein members found in the patient.

7. Cell and Animal Models

[0456] In another aspect of the present invention, cell and animal models are provided in which one or more of the FHOS-containing protein complexes identified in the present invention are in an aberrant form, e.g., increased or decreased level of the protein complexes, altered interaction between interacting protein members of the protein complexes, and/or altered distribution or localization (e.g., in organs, tissues, cells, or cellular compartments) of the protein complexes. Such cell and animal models are useful tools for studying the disorders and diseases caused by the protein complex aberration and for testing various methods for treating the diseases and disorders.

7.1. Cell Models

[0457] Cell models having an aberrant form of one or more of the protein complexes of the present invention are provided in accordance with the present invention.

[0458] The cell models may be established by isolating, from a patient, cells having an aberrant form of one or more of the protein complexes of the present invention. The isolated cells may be cultured in vitro as a primary cell culture. Alternatively, the cells obtained from the primary cell culture or directly from the patient may be immortalized to establish a human cell line. Any methods for constructing immortalized human cell lines may be used in this respect. See generally Yeager and Reddel, Curr. Opini. Biotech., 10:465-469 (1999). For example, the human cells may be immortalized by transfection of plasmids expressing the SV40 early region genes (See e.g., Jha et al., Exp. Cell Res., 245:1-7 (1998)), introduction of the HPV E6 and E7 oncogenes (See e.g., Reznikoff et al., Genes Dev., 8:2227-2240 (1994)), and infection with Epstein-Barr virus (See e.g., Tahara et al., Oncogene, 15:1911-1920 (1997)). Alternatively, the human cells may be immortalized by recombinantly expressing the gene for the human telomerase catalytic subunit hTERT in the human cells. See Bodnar et al., Science, 279:349-352 (1998).

[0459] In alternative embodiments, cell models are provided by recombinantly manipulating appropriate host cells. The host cells may be bacteria cells, yeast cells, insect cells, plant cells, animal cells, and the like. Preferably, the cells are derived from mammals, preferably humans. The host cells may be obtained directly from an individual, or a primary cell culture, or preferably an immortal stable human cell line. In a preferred embodiment, human embryonic stem cells or pluripotent cell lines derived from human stem cells are used as host cells. Methods for obtaining such cells are disclosed in, e.g., Shamblott, et al., Proc. Natl. Acad. Sci. U.S.A, 95:13726-13731 (1998) and Thomson et al., Science, 282:1145-1147 (1998).

[0460] In one embodiment, a cell model is provided by recombinantly expressing one or more of the protein complexes of the present invention in cells that do not normally express such protein complexes. For example, cells that do not contain a particular protein complex may be engineered to express the protein complex. In a specific embodiment, a particular human protein complex is expressed in non-human cells. The cell model may be prepared by introducing into host cells nucleic acids encoding all interacting protein members required for the formation of a particular protein complex, and expressing the protein members in the host cells. For this purpose, the recombination expression methods described in Section 2.2 may be used. In addition, the methods for introducing nucleic acids into host cells disclosed in the context of gene therapy in Section 6.2.2 may also be used.

[0461] In another embodiment, a cell model over-expressing one or more of the protein complexes of the present invention is provided. The cell model may be established by increasing the expression level of one or more of the interacting protein members of the protein complexes. In a specific embodiment, all interacting protein members of a particular protein complex are over-expressed. The over-expression may be achieved by introducing into host cells exogenous nucleic acids encoding the proteins to be over-expressed, and selecting those cells that over-express the proteins. The expression of the exogenous nucleic acids may be transient or, preferably stable. The recombinant expression methods described in Section 2.2, and the methods for introducing nucleic acids into host cells disclosed in the context of gene therapy in Section 6.2.2 may be used. Alternatively, the gene activation method disclosed in U.S. Pat. No.5,641,670 can be used. Any host cells may be employed for establishing the cell model. Preferably, human cells lacking a protein complex to be over-expressed or having a normal level of the protein complex are used as host cells. The host cells may be obtained directly from an individual, or a primary cell culture, or preferably an immortal stable human cell line. In a preferred embodiment, human embryonic stem cells or pluripotent cell lines derived from human stem cells are used as host cells. Methods for obtaining such cells are disclosed in, e.g., Shamblott, et al., Proc. Natl. Acad. Sci. U.S.A, 95:13726-13731 (1998), and Thomson et al., Science, 282:1145-1147 (1998).

[0462] In yet another embodiment, a cell model expressing an abnormally low level of one or more of the protein complexes of the present invention is provided. Typically, the cell model is established by genetically manipulating cells that express a normal and detectable level of a protein complex identified in accordance with the present invention. Generally the expression level of one or more of the interacting protein members of the protein complex is reduced by recombinant methods. In a specific embodiment, the expression of all interacting protein members of a particular protein complex is reduced. The reduced expression may be achieved by “knocking out” the genes encoding one or more interacting protein members. Alternatively, mutations that can cause reduced expression level (e.g., reduced transcription and/or translation efficiency, and decreased mRNA stability) may also be introduced into the gene by homologous recombination. A gene encoding a ribozyme or antisense compound specific to the mRNA encoding an interacting protein member may also be introduced into the host cells, preferably stably integrated into the genome of the host cells. In addition, a gene encoding an antibody or fragment thereof specific to an interacting protein member may also be introduced into the host cells. The recombination expression methods described in Sections 2.2, 6.1 and 6.2 can all be used for purposes of manipulating the host cells.

[0463] The present invention also contemplates a cell model provided by recombinant DNA techniques that exhibits aberrant interactions between the interacting protein members of a protein complex identified in the present invention. For example, variants of the interacting protein members of a particular protein complex exhibiting altered protein-protein interaction properties and the nucleic acid variants encoding such variant proteins may be obtained by random or site-directed mutagenesis in combination with a protein-protein interaction assay system, particularly the yeast two-hybrid system described in Section 5.3.1. Essentially, the genes encoding one or more interacting protein members of a particular protein complex may be subject to random or site-specific mutagenesis and the mutated gene sequences are used in yeast two-hybrid system to test the protein-protein interaction characteristics of the protein variants encoded by the gene variants. In this manner, variants of the interacting protein members of the protein complex may be identified that exhibit altered protein-protein interaction properties in forming the protein complex, e.g., increased or decreased binding affinity, and the like. The nucleic acid variants encoding such protein variants may be introduced into host cells by the methods described above, preferably into host cells that normally do not express the interacting proteins.

7.2. Cell-Based Assays

[0464] The cell models of the present invention containing an aberrant form of an FHOS-containing protein complex of the present invention are useful in screening assays for identifying compounds useful in treating diseases and disorders involving diabetes mellitus, cardiovascular disease, hypertension, nephropathy, acute and chronic inflammatory disorders, autoimmune diseases, cell proliferative disorders, cancers and neurodegenerative disorders. In addition, they may also be used in in vitro pre-clinical assays for testing compounds, such as those identified in the screening assays of the present invention. A variety of parameters relevant to particularly physiological disorders or diseases may be analyzed.

[0465] For example, in one aspect of the invention, a method for screening for compounds that selectively modulate biological functions involving signal transduction, cytoskeleton rearrangement, membrane trafficking, cell polarity, cell movement, transcription activation or inhibition, protein synthesis and cell-cycle regulation may be employed. The method has following steps: (a) delivering a compound to be screened to a cell population of a first kind, wherein the first kind of the cell population is known to show abnormality in said biological functions under a set of culture conditions sufficient for other cell population not to show said abnormality and wherein said abnormality is due to an aberration in a protein complex or an interaction thereof between FHOS and a protein selected from the group of GROUP1 or a homologue or derivative or fragment thereof; (b) delivering the compound to a cell population of a second kind that is not known to show said abnormality under said conditions and not known to have said aberration, wherein the compound does not affect said biological functions of the second kind of the cell population; (c) comparing said biological functions of the first and second kinds of cell populations; and (d) selecting the compound that inhibits said abnormal biological functions of the first kind of cell population comparable to that of the second kind of cell population.

[0466] The first kind of cell populations may be those derived from tissues associated with diabetes mellitus, cardiovascular disease, hypertension, nephropathy, acute and chronic inflammatory disorders, autoimmune diseases, cell proliferative disorders, cancers or neurodegenerative disorders.

7.3. Transgenic Animals

[0467] In another aspect of the present invention, transgenic non-human animals are provided expressing an aberrant form of one or more of the FHOS-containing protein complexes of the present invention. Animals of any species may be used to generate the transgenic animal models, including but not limited to, mice, rats, hamsters, sheep, pigs, rabbits, guinea pigs, preferably non-human primates such as monkeys, chimpanzees, baboons, and the like.

[0468] In one embodiment, the transgenic animals are produced to over-express one or more protein complexes formed from FHOS or a derivative or homologue thereof (including the animal counterpart of FHOS) and an FHOS-interacting protein selected from the group of GROUP1, or a derivative or homologue thereof (including an animal counterpart thereof). Over-expression may be exhibited in a tissue or cell that normally express the animal counterparts of such protein complexes. That is the level the protein complexes is elevated and is higher than the normal level. Alternatively, the one or more protein complexes are expressed in tissues or cells that do not normally express such protein complexes (including the animal counterpart of the human protein complexes). In a specific embodiment, human FHOS and at least one human protein selected from the group of GROUP1 are expressed in the transgenic animals.

[0469] To achieve over-expression in transgenic animals, the transgenic animals are made such that they contain and express exogenous genes encoding FHOS or a homologue or derivative thereof and one or more of the FHOS-interacting proteins or a homologue or derivative thereof. Preferably, both exogenous genes are human genes. Such exogenous genes may be operably linked to a native or non-native promoter, preferably a non-native promoter. For example, an exogenous FHOS gene may be operably linked to a promoter that is not the native FHOS promoter. If the expression of the exogenous gene is desired to be limited to a particular tissue, an appropriate tissue-specific promoter may be used.

[0470] Over-expression may also be achieved by manipulating the native promoter to create mutations that lead to gene over-expression, or by a gene activation method such as that disclosed in U.S. Pat. No. 5,641,670 as described above.

[0471] In another embodiment, the transgenic animal expresses an abnormally low level of one or more of protein complexes comprising FHOS and a protein selected from the group of GROUP1. In a specific embodiment, the transgenic animal is a “knockout” animal wherein the endogenous gene encoding the animal homologue of FHOS and/or an endogenous gene encoding an animal homologue of an FHOS-interacting protein are knocked out. In a specific embodiment, the expression of all interacting protein members of a particular protein complex comprising an animal homologues of FHOS and an animal homologues of a protein selected from the group of GROUP1 is reduced or knocked out. The reduced expression may be achieved by knocking out the genes encoding one or more interacting protein members, typically by homologous recombination. Alternatively, mutations that can cause reduced expression level (e.g., reduced transcription and/or translation efficiency, and decreased mRNA stability) may also be introduced into the endogenous genes by homologous recombination. Genes encoding ribozymes or antisense compounds specific to the mRNAs encoding the interacting protein members may also be introduced into the transgenic animal. In addition, genes encoding antibodies or fragments thereof specific to the interacting protein members may also be introduced into the transgenic animal.

[0472] In an alternate embodiment, the transgenic animal endogenous genes encoding the animal homologues of FHOS and the animal homologues of an FHOS-interacting protein are both knocked out. Instead, the transgenic animal expresses a human version of FHOS and a protein selected from the group of GROUP1.

[0473] Unique approaches have been developed and reported in the art, which approaches combine gene knocked out of the endogenous gene of a non-human mammal and gene transfer of a human homologue into the early embryo of a non-human mammal to generate an animal model for drug screening and development studies. For example, a transgenic mouse can be generated which can be knock out for the endogenous FHOS (FHOS-null) but expresses a wild type human FHOS gene. Because of the homology human FHOS gene can compensate for the endogenous FHOS gene. These animals are useful in the study of the progression of FHOS related disorders and the development of strategies to cure such disorders by therapeutic drugs or by somatic cell therapy. Production of Transgenic animals such as, example, mice, rats, pigs, rabbits, cows, goats and monkeys can achieved by embryonic stem cell technology. The expression of the transgenes can be directed to specific tissues by using tissue specific promoters or sequences such as the locus control regions known in the art. The transgenic FHOS-null animals expressing a human FHOS gene containing specific mutations similar to that observed in FHOS of human patients, which mutations cause FHOS related disorder in these patients, can be generated. Alternatively, these specific mutations can be introduced directly into the transgenic animals expressing a wild type human FHOS gene via homologous recombination in embryonic stem cells. The transgenic animal with specific mutations in the human FHOS transgene provide an excellent test model to predict onset and progression of the diabetes mellitus, cardiovascular disease, hypertension, nephropathy, acute and chronic inflammatory disorders, autoimmune diseases, cell proliferative disorders, cancers and neurodegenerative disorders and to design and test drug formulations for treatment of FHOS related disorders resulting from a specific mutation in humans.

[0474] In yet another embodiment, the transgenic animal of this invention exhibits aberrant interactions between FHOS and an FHOS-interacting protein selected from the group of GROUP1. For this purpose, variants of FHOS and its interaction partners exhibiting altered protein-protein interaction properties and the nucleic acid variants encoding such variant proteins may be obtained by random or site-specific mutagenesis in combination with a protein-protein interaction assay system, particularly the yeast two-hybrid system described in Section 5.3.1. For example, variants of FHOS and its interaction partners exhibiting increased or decreased or abolished binding affinity to each other may be identified and isolated. The transgenic animal of the present invention may be made to express such protein variants by modifying the endogenous genes. Alternatively, the nucleic acid variants may be introduced exogenously into the transgenic animal genome to express the protein variants therein. In a specific embodiment, the exogenous nucleic acid variants are derived from human and the corresponding endogenous genes are knocked out.

[0475] Any techniques known in the art for making transgenic animals may be used for purposes of the present invention. For example, the transgenic animals of the present invention may be provided by methods described in, e.g., Jaenisch, Science, 240:1468-1474 (1988); Capecchi, et al., Science, 244:1288-1291 (1989); Hasty et al, Nature, 350:243 (1991); Shinkai et al., Cell, 68:855 (1992); Mombaerts et al., Cell, 68:869 (1992); Philpott et al., Science, 256:1448 (1992); Snouwaert et al., Science, 257:1083 (1992); Donehower et al., Nature, 356:215 (1992); Hogan et al., Manipulating the Mouse Embryo; A Laboratory Manual, 2^{nd} edition, Cold Spring Harbor Laboratory Press, 1994; and U.S. Pat. Nos. 4,873,191; 5,800,998; 5,891,628, all of which are incorporated herein by reference.

[0476] Generally, the founder lines may be established by introducing appropriate exogenous nucleic acids into, or modifying an endogenous gene in, germ lines, embryonic stem cells, embryos, or sperms which are then in producing a transgenic animal. The gene introduction may be conducted by various methods including those described in Sections 2.2, 6.1 and 6.2. See also, Van der Putten et al., Proc. Natl. Acad Sci. U.S.A, 82:6148-6152 (1985); Thompson et al., Cell, 56:313-321 (1989); Lo, Mol. Cell. Biol., 3:1803-1814 (1983); Gordon, Trangenic Animals, Intl. Rev. Cytol. 115:171-229 (1989); and Lavitrano et al., Cell, 57:717-723 (1989). In a specific embodiment, the exogenous gene is incorporated into an appropriate vector, such as those described in Sections 2.2 and 6.2, and is transformed into embryonic stem (ES) cells. The transformed ES cells are then injected into a blastocyst. The blastocyst with the transformed ES cells is then implanted into a surrogate mother animal. In this manner, a chimeric founder line animal containing the exogenous nucleic acid (transgene) may be produced.

[0477] Preferably, site-specific recombination is employed to integrate the exogenous gene into a specific predetermined site in the animal genome, or to replace an endogenous gene or a portion thereof with the exogenous sequence. Various site-specific recombination systems may be used including those disclosed in Sauer, Curr. Opin. Biotechnol., 5:521-527 (1994); and Capecchi, et al., Science, 244:1288-1291 (1989), and Gu et al., Science, 265:103-106 (1994). Specifically, the Cre/lox site-specific recombination system known in the art may be conveniently used which employs the bacteriophage P1 protein Cre recombinase and its recognition sequence loxP. See Rajewsky et al., J. Clin. Invest., 98:600-603 (1996); Sauer, Methods, 14:381-392 (1998); Gu et al., Cell, 73:1155-1164 (1993); Araki et al., Proc. Natl. Acad. Sci. U.S.A, 92:160-164 (1995); Lakso et al., Proc. Natl. Acad. Sci. U.S.A, 89:6232-6236 (1992); and Orban et al., Proc. Natl. Acad. Sci. U.S.A, 89:6861-6865 (1992).

[0478] The transgenic animals of the present invention may be transgenic animals that carry a transgene in all cells or mosaic transgenic animals carrying a transgene only in certain cells, e.g., somatic cells. The transgenic animals may have a single copy or multiple copies of a particular transgene.

[0479] The founder transgenic animals thus produced may be bred to produce various offsprings. For example, they can be inbred, outbred, and crossbred to establish homozygous lines, heterozygous lines, and compound homozygous or heterozygous lines.

8. Pharmaceutical Compositions and Formulations

[0480] In another aspect of the present invention, pharmaceutical compositions are also provided containing one or more of the therapeutic agents provided in the present invention as described in Section 6. The compositions are prepared as a pharmaceutical formulation suitable for administration into a patient. Accordingly, the present invention also extends to pharmaceutical compositions, medicaments, drugs or other compositions containing one or more of the therapeutic agent in accordance with the present invention.

[0481] In the pharmaceutical composition, an active compound identified in accordance with the present invention can be in any pharmaceutically acceptable salt form. As used herein, the term “pharmaceutically acceptable salts” refers to the relatively non-toxic, organic or inorganic salts of the compounds of the present invention, including inorganic or organic acid addition salts of the compound. Examples of such salts include, but are not limited to, hydrochloride salts, sulfate salts, bisulfate salts, borate salts, nitrate salts, acetate salts, phosphate salts, hydrobromide salts, laurylsulfonate salts, glucoheptonate salts, oxalate salts, oleate salts, laurate salts, stearate salts, palmitate salts, valerate salts, benzoate salts, naththylate salts, mesylate salts, tosylate salts, citrate salts, lactate salts, maleate salts, succinate salts, tartrate salts, fumarate salts, and the like. See, e.g., Berge, et al., J. Pharm. Sci., 66:1-19 (1977).

[0482] For oral delivery, the active compounds can be incorporated into a formulation that includes pharmaceutically acceptable carriers such as binders (e.g., gelatin, cellulose, gum tragacanth), excipients (e.g., starch, lactose), lubricants (e.g., magnesium stearate, silicon dioxide), disintegrating agents (e.g., alginate, Primogel, and corn starch), and sweetening or flavoring agents (e.g., glucose, sucrose, saccharin, methyl salicylate, and peppermint). The formulation can be orally delivered in the form of enclosed gelatin capsules or compressed tablets. Capsules and tablets can be prepared in any conventional techniques. The capsules and tablets can also be coated with various coatings known in the art to modify the flavors, tastes, colors, and shapes of the capsules and tablets. In addition, liquid carriers such as fatty oil can also be included in capsules.

[0483] Suitable oral formulations can also be in the form of suspension, syrup, chewing gum, wafer, elixir, and the like. If desired, conventional agents for modifying flavors, tastes, colors, and shapes of the special forms can also be included. In addition, for convenient administration by enteral feeding tube in patients unable to swallow, the active compounds can be dissolved in an acceptable lipophilic vegetable oil vehicle such as olive oil, corn oil and safflower oil.

[0484] The active compounds can also be administered parenterally in the form of solution or suspension, or in lyophilized form capable of conversion into a solution or suspension form before use. In such formulations, diluents or pharmaceutically acceptable carriers such as sterile water and physiological saline buffer can be used. Other conventional solvents, pH buffers, stabilizers, anti-bacteria agents, surfactants, and antioxidants can all be included. For example, useful components include sodium chloride, acetates, citrates or phosphates buffers, glycerin, dextrose, fixed oils, methyl parabens, polyethylene glycol, propylene glycol, sodium bisulfate, benzyl alcohol, ascorbic acid, and the like. The parenteral formulations can be stored in any conventional containers such as vials and ampoules.

[0485] Routes of topical administration include nasal, bucal, mucosal, rectal, or vaginal applications. For topical administration, the active compounds can be formulated into lotions, creams, ointments, gels, powders, pastes, sprays, suspensions, drops and aerosols. Thus, one or more thickening agents, humectants, and stabilizing agents can be included in the formulations. Examples of such agents include, but are not limited to, polyethylene glycol, sorbitol, xanthan gum, petrolatum, beeswax, or mineral oil, lanolin, squalene, and the like. A special form of topical administration is delivery by a transdermal patch. Methods for preparing transdermal patches are disclosed, e.g., in Brown, et al., Annual Review of Medicine, 39:221-229 (1988), which is incorporated herein by reference.

[0486] Subcutaneous implantation for sustained release of the active compounds may also be a suitable route of administration. This entails surgical procedures for implanting an active compound in any suitable formulation into a subcutaneous space, e.g., beneath the anterior abdominal wall. See, e.g., Wilson et al., J. Clin. Psych. 45:242-247 (1984). Hydrogels can be used as a carrier for the sustained release of the active compounds. Hydrogels are generally known in the art. They are typically made by crosslinking high molecular weight biocompatible polymers into a network, which swells in water to form a gel like material. Preferably, hydrogels is biodegradable or biosorbable. For purposes of this invention, hydrogels made of polyethylene glycols, collagen, or poly(glycolic-co-L-lactic acid) may be useful. See, e.g., Phillips et al., J. Pharmaceut. Sci. 73:1718-1720 (1984).

[0487] The active compounds can also be conjugated, to a water soluble non-immunogenic non-peptidic high molecular weight polymer to form a polymer conjugate. For example, an active compound is covalently linked to polyethylene glycol to form a conjugate. Typically, such a conjugate exhibits improved solubility, stability, and reduced toxicity and immunogenicity. Thus, when administered to a patient, the active compound in the conjugate can have a longer half-life in the body, and exhibit better efficacy. See generally, Burnham, Am. J Hosp. Pharm., 15:210-218 (1994). PEGylated proteins are currently being used in protein replacement therapies and for other therapeutic uses. For example, PEGylated interferon (PEG-INTRON A®) is clinically used for treating Hepatitis B. PEGylated adenosine deaminase (ADAGEN®) is being used to treat severe combined immunodeficiency disease (SCIDS). PEGylated L-asparaginase (ONCAPSPAR®) is being used to treat acute lymphoblastic leukemia (ALL). It is preferred that the covalent linkage between the polymer and the active compound and/or the polymer itself is hydrolytically degradable under physiological conditions. Such conjugates known as “prodrugs” can readily release the active compound inside the body. Controlled release of an active compound can also be achieved by incorporating the active ingredient into microcapsules, nanocapsules, or hydrogels generally known in the art.

[0488] Liposomes can also be used as carriers for the active compounds of the present invention. Liposomes are micelles made of various lipids such as cholesterol, phospholipids, fatty acids, and derivatives thereof. Various modified lipids can also be used. Liposomes can reduce the toxicity of the active compounds, and increase their stability. Methods for preparing liposomal suspensions containing active ingredients therein are generally known in the art. See, e.g., U.S. Pat. No. 4,522,811; Prescott, Ed., Methods in Cell Biology, Volume XIV, Academic Press, New York, N.Y. (1976).

[0489] The active compounds can also be administered in combination with another active agent that synergistically treats or prevents the same symptoms or is effective for another disease or symptom in the patient treated so long as the other active agent does not interfere with or adversely affect the effects of the active compounds of this invention. Such other active agents include but are not limited to anti-inflammation agents, antiviral agents, antibiotics, antifungal agents, antithrombotic agents, cardiovascular drugs, cholesterol lowering agents, anti-cancer drugs, hypertension drugs, and the like.

[0490] Generally, the toxicity profile and therapeutic efficacy of the therapeutic agents can be determined by standard pharmaceutical procedures in cell models or animal models, e.g., those provided in Section 7. As is known in the art, the LD₅₀ represents the dose lethal to about 50% of a tested population. The ED₅₀ is a parameter indicating the dose therapeutically effective in about 50% of a tested population. Both LD₅₀ and ED₅₀ can be determined in cell models and animal models. In addition, the IC₅₀ may also be obtained in cell models and animal models, which stands for the circulating plasma concentration that is effective in achieving about 50% of the maximal inhibition of the symptoms of a disease or disorder. Such data may be used in designing a dosage range for clinical trials in humans. Typically, as will be apparent to skilled artisans, the dosage range for human use should be designed such that the range centers around the ED₅₀ and/or IC₅₀, but significantly below the LD₅₀ obtained from cell or animal models.

[0491] It will be apparent to skilled artisans that therapeutically effective amount for each active compound to be included in a pharmaceutical composition of the present invention can vary with factors including but not limited to the activity of the compound used, stability of the active compound in the patient's body, the severity of the conditions to be alleviated, the total weight of the patient treated, the route of administration, the ease of absorption, distribution, and excretion of the active compound by the body, the age and sensitivity of the patient to be treated, and the like. The amount of administration can also be adjusted as the various factors change over time.

9. Isolated Nucleic Acids

[0492] The present invention also provides for isolated nucleic acid molecules. and their fragments encoding one or more interacting protein members of a protein complex identified in the present invention or portions of these polypeptides that are capable of interacting with other protein(s) of the present protein-protein interactions. The term “nucleic acid” is intended to include both DNA (e.g., cDNA or genomic DNA) and RNA (e.g., mRNA). This aspect of the invention also pertains to isolated nucleic acid fragments sufficient for use as hybridization probes to identify nucleic acids encoding polypeptides capable of interacting with other protein(s) of the protein-protein interactions disclosed herein, and to isolated nucleic acid fragments for use as PCR primers for the amplification or mutation of nucleic acids encoding polypeptides capable of interacting with the other proteins.

[0493] The nucleic acid fragment encoding a polypeptide capable of interacting with other protein(s) of the protein-protein interactions disclosed herein can be prepared by isolating a fragment, sequencing the fragment (optional), expressing the fragment (e.g., by recombinant expression in vitro) and assessing the protein interacting property of the encoded polypeptide.

[0494] The isolated polynucleotide, over its entire length, may be 100% identical or less than 100% identical to a reference sequence (i.e., a specific nucleic acid sequence disclosed herein) or to a fragment of the reference sequence depending on the number of nucleotide alterations or variations in the isolated polynucleotide. The isolated polynucleotide which, over its entire length, is less than 100% identical to the reference sequence or to the fragment of the reference sequence is a variant nucleic acid. The number of nucleotide alterations or variations (Aₙₜ) needed for a given % identity is determined by first multiplying (×) the total number of nucleotides (Tₐₜ) in the reference sequence by a number (n) which is obtained by dividing the percent identity by 100 (for example 0.80 for 80%, 0.90 for 90% 0.92 for 92%, 0.95 for 95%, 0.97 for 97% and so on) and then subtracting that product from said total number of nucleotides (Tₙₜ) in the reference sequence. After this calculation, any non-integer value may be rounded off to the nearest integer to obtain the approximate number without decimal values. For purposes of clarity, only the first decimal number is rounded off, to approximate the number of nucleic acid alterations to an integer to obtain a polynucleotide of a given % identity. If the first decimal number is 5 or greater than 5, then the number preceding the decimal point is increased by “one” and all the decimal numbers are dropped (rounded up). If the first decimal number is less than 5, then the number preceding the decimal point is unchanged and all the decimal numbers are dropped (rounded down). The calculation is summarized in the following formula:
Aₙₜ≅Tₙₜ−(Tₙₜ×n)

[0495] Accordingly, in another aspect of the invention, the isolated nucleic acids of the present invention encompass variant nucleic acids, which are variants of the full-length nucleic acids disclosed herein or variants of the fragments of the full-length nucleic acids. The variant nucleic acid may encode a polypeptide the same as a specific polypeptide disclosed herein or a variant polypeptide as that term is used herein (See, 2.2. Protein Complexes). For example, the variant nucleic acid may encode the same polypeptide because of degeneracy of the code (i.e., a given amino acid may be specified by more than one codon). Under certain circumstances, an isolated variant nucleic acid may encode a variant polypeptide instead. For example, nucleic acid sequence polymorphisms leading to changes in the amino acid sequences of SEQ ID NO: 6, 10, 25, 30 or 46, 57, 65, 75, 82, 88 or 107, 120, 123, 132 or 141 or their homologues of these sequences may exist within a given population (e.g., the human population). Such genetic polymorphisms may exist among individuals within a population due to natural allelic variation. Any and all such nucleotide variations and resulting amino acid polymorphism that may be the result of variation, natural or induced allelic variation and that do not alter the functional properties of interest herein are contemplated by the present invention.

[0496] A variant nucleic acid encoding a polypeptide capable of interacting with other protein(s) of the protein-protein interactions disclosed herein can be prepared by isolating a nucleic acid, determining the sequence identities with the reference sequences or fragments thereof, expressing the variant nucleic acid (e.g., by recombinant expression in vitro) and assessing the protein interacting property of the encoded polypeptide.

[0497] The isolated nucleic acids, their fragments or variants encoding polypeptides of the present invention may be mouse sequences or their homologues (e.g. human proteins).

[0498] The nucleic acid sequences of the present invention, e.g., a nucleic acid molecule having the sequence of SEQ ID NO: 48, 49 or 50, 111-114, 157-159 or a fragment thereof, can be isolated from an appropriate biological source or library using methods known to one skilled in the art and the sequence information disclosed herein. For example, using all or a portion of a nucleic acid sequence disclosed herein as a hybridization probe, the nucleic acid such as a cDNA clone is isolated from a cDNA library of human origin. Further, utilizing the sequence information provided by the cDNA sequence, human genomic clones encoding a polypeptide identical to that set forth herein or variants thereof can be isolated.

[0499] The nucleic acids having the appropriate level of sequence relatedness with the reference polynucleotide sequences may be identified by using hybridization and washing conditions of appropriate stringency. The terms “stringent conditions” and “stringent hybridization conditions” mean hybridization occurring only if there is at least 90% preferably at least 95% and more preferably at least 97% and most preferably 100% identity between the sequences. It is well known that during nucleic acid hybridizations, conditions can be set up so that hybridizations only occur between the probe and the target nucleic acid of interest that is highly complementary to the probe. The Tₘ (melting temperature; a measure of the stability of a nucleic acid duplex) of perfect hybrids formed by DNA, RNA or oligonucleotide probes can be determined according to the art known formula which is as follows:

[0500] Tₘ(° C.)=81.5*+16.6(log M[Na⁺])+0.41(%G+C)−0.72(% fomamide). (* The value of 81.5 in the above formula is for DNA-DNA hybrids; For DNA-RNA, RNA-RNA, oligo-DNA or oligo-RNA hybrids this value is different and is known in the art).

[0501] For mammalian genomes, with a base composition of about 40% GC, the DNA denatures with a Tm of about 87° C. A specific example of stringent hybridization conditions is as follows: an overnight incubation at 42° C. in a solution having: 5×SSC (150 mM NaCl, 15 mM trisodium citrate), 50 mM sodium phosphate (pH7.6), 5×Denhardt's solution, 10% dextran sulfate, and 20 micrograms/ml of denatured, sheared salmon sperm DNA, 50% formamide, followed by washing the hybridization support in 0.1×SSC at about 65° C. The [Na⁺]M of different strengths of SSC are as follows: For 20×, 10×, 5×, 2×, 1×, 0.1× are 3.3, 1.65, 0.825, 0.33, 0.165 and 0.0165, respectively. Hybridization and wash conditions are well known and exemplified in laboratory manuals. See, Sambrook, et al., Molecular Cloning: A Laboratory Manual, particularly Chapter 10 (third edition) therein. Solution hybridization may also be used with the polynucleotide sequences provided by the invention.

[0502] The novel polynucleotides of the present invention may also be obtained from an appropriate library or nucleic acid containing samples (e.g. cell samples) by selective amplification of target sequences using PCR. The sequence information disclosed in the present application can be used to design oligonucleotide primers. Primers corresponding to regions immediately upstream and downstream of the nucleic encoding a given polypeptide can be used to amplify the sequences encoding one or more interacting protein members of a protein complex identified in the present invention or portions of these polypeptides that are capable of interacting with other protein(s) of the present protein-protein interactions. The oligonucleotide primers can be from 15 to about 25 nucleotides long. In preferred embodiments, primers of about 20 nucleotides long are used. By keeping the stringency of annealing between the primer and the target very high, the formation of spurious products (i.e., those that do not encode polypeptides capable of interacting with bait polypeptides) can be avoided. To this end, strategies known in the prior art (e.g., choosing suitable length of primers, avoiding substantial tandem repeats of one or more nucleotides in the primer, avoiding sequences prone to secondary structure, nested primers etc.,) may be applied to achieve specificity.

[0503] The PCR primers specific to a given nucleic acid can be used to isolate polynucleotides (e.g., from mouse and/or other mammalian samples including humans), the polynucleotides encoding polypeptides identical to the disclosed polypeptides and variants thereof. The polynucleotides may then be subject to various prior art known techniques for elucidation of the polynucleotide sequence. In this way, variants of (or mutations in) the polynucleotide sequence can be detected. This information can be used in the protein-protein interaction of the invention.

[0504] Thus, probes and primers based on the nucleic acid sequences disclosed herein can be used to detect and isolate transcripts or genomic sequences encoding polypeptides of interest from mouse samples or homologous polypeptides from human samples.

[0505] In a preferred embodiment, an isolated nucleic acid molecule of the invention consists essentially of nucleotide sequence shown in SEQ ID NO: 48, 49 or 50, 111-114, 157-159.

[0506] In another preferred embodiment, an isolated nucleic acid molecule of the invention consists essentially of a nucleic acid molecule which is a complement of the nucleic acid sequence shown in SEQ ID NO: 48, 49 or 50, 111-114, 157-159 or a portion of any of these nucleic acid sequences. An isolated nucleic acid molecule which is complementary to the nucleotide sequence shown in SEQ ID NO: 48, 49 or 50, 111-114, 157-159 is either fully complementary or sufficiently complementary to the nucleotide sequence shown in SEQ ID NO: 48, 49 or 50, 111-114, and 157-159, respectively, so that it can hybridize to the nucleotide sequence shown in SEQ ID NO: 48, 49 or 50, 111-114, and 157-159, respectively, under stringent hybridization conditions.

[0507] In still another preferred embodiment, the nucleic acid fragments of the invention consist essentially of contiguous nucleotides (i) 1 to 807 set forth in SEQ ID NO: 48, (ii) 1 to 348 set forth in SEQ ID NO: 49 and (iii) 1 to 1281 set forth in SEQ ID NO: 50. The hybridization probe used to detect and isolate these fragments can be a segment of 15-mer to 30-mer, 50-mer, 100-mer or more of the nucleic acid set forth in SEQ ID NO: 48, 49 or 50. Preferably, the hybridization probes and primers correspond to or include regions immediately upstream and downstream of contiguous nucleotides indicated in (i)-(iii) in this paragraph.

[0508] In still another preferred embodiment, the nucleic acid fragments of the invention consist essentially of contiguous nucleotides (i) 1 to 486 set forth in SEQ ID NO: 63, (ii) 1 to 891 set forth in SEQ ID NO: 64, (iii) 1 to 783 set forth in SEQ ID NO: 65 and (iv) 1 to 723 set forth in SEQ ID NO: 66. The hybridization probe used to detect and isolate these fragments can be a segment of 5-mer to 30-mer, 50-mer, 100-mer or more of the nucleic acid set forth in SEQ ID NO: 63-66. Preferably, the hybridization probes and primers correspond to or include regions immediately upstream and downstream of contiguous nucleotides indicated in (i)-(iv) in this paragraph.

[0509] In still another preferred embodiment, the nucleic acid fragments of the invention consist essentially of contiguous nucleotides (i) 1 to 1098 set forth in SEQ ID NO: 157, (ii) 1 to 591 set forth in SEQ ID NO: 158 and (iii) 1 to 375 set forth in SEQ ID NO: 158. The hybridization probe used to detect and isolate these fragments can be a segment of 15-mer to 30-mer, 50-mer, 100-mer or more of the nucleic acid set forth in SEQ ID NO: 157, 158 or 159. Preferably, the hybridization probes and primers correspond to or include regions immediately upstream and downstream of contiguous nucleotides indicated in (i)-(iii) in this paragraph.

### EXAMPLES

1. Yeast Two-Hybrid System

[0510] The principles and methods of the yeast two-hybrid system have been described in detail (Bartel and Fields, 1997). The following is thus a description of the particular procedure that we used, which was applied to all proteins.

[0511] The cDNA encoding the bait protein was generated by PCR from cDNA prepared from a desired tissue. The cDNA product was then introduced by recombination into the yeast expression vector pGBT.Q, which is a close derivative of pGBT.C (See Bartel et al., Nat Genet., 12:72-77 (1996)) in which the polylinker site has been modified to include M13 sequencing sites. The new construct was selected directly in the yeast strain PNY200 for its ability to drive tryptophan synthesis (genotype of this strain: AMTalpha trp1-901 leu2-3,112 ura3-52 his3-200 ade2 gal4delta gal80). In these yeast cells, the bait was produced as a C-terminal fusion protein with the DNA binding domain of the transcription factor Gal4 (amino acids 1 to 147). Prey libraries were transformed into the yeast strain BK100 (genotype of this strain: MATa trpl-901 leu2-3,112 ura3-52 his3-200 gal4delta gal80 LYS2::GAL-H153 GAL2-ADE2 met2::GAL7-lacZ), and selected for the ability to drive leucine synthesis. In these yeast cells, each cDNA was expressed as a fusion protein with the transcription activation domain of the transcription factor Gal4 (amino acids 768 to 881) and a 9 amino acid hemagglutinin epitope tag. PNY200 cells (MATalpha mating type), expressing the bait, were then mated with BK100 cells (MATa mating type), expressing prey proteins from a prey library. The resulting diploid yeast cells expressing proteins interacting with the bait protein were selected for the ability to synthesize tryptophan, leucine, histidine, and adenine. DNA was prepared from each clone, transformed by electroporation into E. coli strain KC8 (Clontech KC8 electrocompetent cells, Catalog No. C2023-1), and the cells were selected on ampicillin-containing plates in the absence of either tryptophan (selection for the bait plasmid) or leucine (selection for the library plasmid). DNA for both plasmids was prepared and sequenced by the dideoxynucleotide chain termination method. The identity of the bait cDNA insert was confirmed and the cDNA insert from the prey library plasmid was identified using the BLAST program to search against public nucleotide and protein databases. Plasmids from the prey library were then individually transformed into yeast cells together with a plasmid driving the synthesis of lamin and 5 other test proteins, respectively, fused to the Gal4 DNA binding domain. Clones that gave a positive signal in the beta-galactosidase assay were considered false-positives and discarded. Plasmids for the remaining clones were transformed into yeast cells together with the original bait plasmid. Clones that gave a positive signal in the beta-galactosidase assay were considered true positives.

2. Production of Antibodies Selectively Immunoreactive with Protein Complex

[0512] The FHOS-interacting domain of PROTEIN2 and the PROTEIN2-interacting domain of FHOS are indicated in Table 1 in Section 2. Both interacting domains are recombinantly expressed in E. coli and isolated and purified. A protein complex is formed by mixing the two purified interacting domains. A protein complex is also formed by mixing recombinantly expressed intact complete FHOS and PROTEIN2. The two protein complexes are used as antigens in immunizing a mouse. mRNA is isolated from the immunized mouse spleen cells, and first-strand cDNA is synthesized based on the mRNA. The V_{H} and V_{K} genes are amplified from the thus synthesized cDNAs by PCR using appropriate primers.

[0513] The amplified V_{H} and V_{K} genes are ligated together and subcloned into a phagemid vector for the construction of a phage display library. E. coli. cells are transformed with the ligation mixtures, and thus a phage display library is established. Alternatively, the ligated V_{H} and Vₖ genes are subcloned into a vector suitable for ribosome display in which the V_{H}-Vₖ sequence is under the control of a T7 promoter. See Schaffitzel et al., J. Immun. Meth., 231:119-135 (1999).

[0514] The libraries are screened with the FHOS-PROTEIN2 complex and individual FHOS and PROTEIN2. Several rounds of screening are preferably performed. Clones corresponding to scFv fragments that bind the FHOS-PROTEIN2 complex, but not the individual FHOS and PROTEIN2 are selected and purified. A single purified clone is used to prepare an antibody selectively immunoreactive with the FHOS-PROTEIN2 complex. The antibody is then verified by an immunochemistry method such as RIA and ELISA.

[0515] In addition, the clones corresponding to scFv fragments that bind the FHOS-PROTEIN2 complex and also binds FHOS and/or PROTEIN2 may be selected. The scFv genes in the clones are diversified by mutagenesis methods such as oligonucleotide-directed mutagenesis, error-prone PCR (See, Lin-Goerke et al., Biotechniques, 23:409 (1997)), dNTP analogues (See, Zaccolo et al., J. Mol. Biol., 255:589 (1996)), and other methods. The diversified clones are further screened in phage display or ribosome display libraries. In this manner, scFv fragments selectively immunoreactive with the FHOS-PROTEIN2 complex may be obtained.

[0516] All publications and patent applications mentioned in the specification are indicative of the level of those skilled in the art to which this invention pertains. All publications and patent applications are herein incorporated by reference to the same extent as if each individual publication or patent application was specifically and individually indicated to be incorporated by reference.

[0517] Although the foregoing invention has been described in some detail by way of illustration and example for purposes of clarity of understanding, it will be obvious that certain changes and modifications may be practiced within the scope of the appended claims.

The application's sequence listing, which the Patent Office published only in electronic form, follows.

SEQUENCE LISTING (161 sequences)

SEQ ID NO: 1 - protein, 150 aa, Homo sapiens
MAGGEDRGDGEPVSVVTVRVQYLEDTDPFACANFPEPRRAPTCSLDGALPLGAQIPAVHRLLGAPLKLEDCALQVSPSGYYLDTELSLEEQREMLEGFYEEISKGRKPTLILRTQLSVRVNAILEKLYSSSGPELRRSLFSLKQIFQEDK

SEQ ID NO: 2 - protein, 250 aa, Homo sapiens
MAGGEDRGDGEPVSVVTVRVQYLEDTDPFACANFPEPRRAPTCSLDGALPLGAQIPAVHRLLGAPLKLEDCALQVSPSGYYLDTELSLEEQREMLEGFYEEISKGRKPTLILRTQLSVRVNAILEKLYSSSGPELRRSLFSLKQIFQEDKDLVPEFVHSEGLSCLIRVGAAADHNYQSYILRALGQLMLFVDGMLGVVAHSDTIQWLYTLCASLSRLVVKTALKLLLVFVEYSENNAPLFIRAVNSVATT

SEQ ID NO: 3 - protein, 348 aa, Homo sapiens
MAGGEDRGDGEPVSVVTVRVQYLEDTDPFACANFPEPRRAPTCSLDGALPLGAQIPAVHRLLGAPLKLEDCALQVSPSGYYLDTELSLEEQREMLEGFYEEISKGRKPTLILRTQLSVRVNAILEKLYSSSGPELRRSLFSLKQIFQEDKDLVPEFVHSEGLSCLIRVGAAADHNYQSYILRALGQLMLFVDGMLGVVAHSDTIQWLYTLCASLSRLVVKTALKLLLVFVEYSENNAPLFIRAVNSVATTTGAPPWANLVSILEEKNGADPELLVYTVTLINKTLAALPDQDSFYDVTDALEQQGMDTLVQRHLGTAGTDVDLRTQLVLYENALKLEDGDIEEAPGAG

SEQ ID NO: 4 - protein, 134 aa, Mus musculus
IRDESLCSQHHEPLSLFCYEDQEAVCLICAISHTHRPHTVVPMDDATQEYKEKLQKCLEPLEQKLQEITCCKASEEKKPGELKRLVESRRQQILKEFEELHRRLDEEQQTLLSRLEEEEQDILQRLRENAAHLG

SEQ ID NO: 5 - protein, 303 aa, Mus musculus
EEEDNVLVLKKSNFEEALAAHKYLLVEFYAPWCGHCKALAPEYAKAAAKLKAEGSEIRLAKVDATEESDLAQQYGVRGYPTIKFFKNGDTASPKEYTAGREADDIVNWLKKRTGPAATTLSDTAAAESLVDSSEVTVIGFFKDVESDSAKQFLLAAEAIDDIPFGITSNSGVFSKYQLDKDGVVLFKKFDEGRNNFEGEITKEKLLDFIKHNQLPLVIEFTEQTAPKIFGGEIKTHILLFLPRSVSDYDGKLSSFKRAAEGFKGKILFIFINSDHTDNQRILEFFGLKKEECPAVRLITLEEE

SEQ ID NO: 6 - protein, 269 aa, Mus musculus
GHDSSLFEDRSDHDKHKDRKRKKRKKGEKQAPGEEKGRKRRRVKEDKKKRDRDRAENEVDRDLQCHVPIRLDLPPEKPLTSSLAKQEEVEQTPLQEALNQLMRQLQSTMKEKIKNNDYQSIEELKDNFKLMCTNAMIYNKPETIYYKAAKKLLHSGMKILSQERIQSLKQSIDFMSDLQKTRKQKERTDACQSGEDSGCWQREREDSGDAETQAFRSPAKDNKRKDRDVLEDKWRSSNSEREHEQIERVVQESGGKLTRRLANSQCEFE

SEQ ID NO: 7 - protein, 224 aa, Mus musculus
NDWAALLELWDKCQHQYRQCLDFHLFYRDSEQVDSWMSGQEAFLENEDLGNSVGSVEALLQKHDDFEEAFTAQEEKIITLDETATKLIDNDHYDSENIAAIRDGLLARRDALRERAATRRKLLVDSQLLQQLYQDSDDLKTWINKKKKLADDDDYKDVQNLKSRVQKQQDFEEELAVNEIMLNNLEKTGQEMIEDGHYASEAVAARLSEVANLWKELLVATAHK

SEQ ID NO: 8 - protein, 320 aa, Homo sapiens
DIGGLEDVKRELQELVQYPVEHPDKFLKFGMTPSKGVLFYGPPGCGKTLLAKAIANECQANFISIKGPELLTMWFGESEANVREIFDKARQAAPCVLFFDELDSIAKARGGNIGDGGGAADRVINQILTEMDGMSTKKNVFIIGATNRPDIIDPAILRPGRLDQLIYIPLPDEKSRVAILKANLQKSPVAKDVDLEFLAKMTNGFSGADLTEICQRACKLAIRESIESEIRRERERQTNPSAMEVEEDDPVPEIRRDHFEEAMRFARRSVSDNDIRKYEMFAQTLQQSRGFGSFRFPSGNQGGAGPSQGSGGGTGGSVYT

SEQ ID NO: 9 - protein, 288 aa, Mus musculus
HYLAQWIESQPWGAIDLDNPQDRGQATQLLEGLVQELQKKAEHQVGEDGFLLKIKLGHYATQLQNTYDRCPMELVRCIRHILYNEQRLVREANNCSSPAGVLVDAMSQKHLQINQRFEELRLITQDTENELKKLQQTQEYFIIQYQESLRIQAQFAQLGQLNPQERMSRETALQQKQVSLETWLQREAQTLQQYRVELAEKHQKTLQLLRKQQTIILDDELIQWKRRQQLAGNGGPPEGSLDVLQSWCEKLAEIIWQNRQQIRRAEHLCQQLPIPGPVEEMLAEVNAT

SEQ ID NO: 10 - protein, 116 aa, Mus musculus
AIVERRANLLRAEIEELRATLEQTERSRKIAEQELLDASERVQLLHTQNTSLINTKKKLENDVSQLQSEVEEVIQESRNAEEKAKKAITDAAMMAEELKKEQDTSAHLERMKKNME

SEQ ID NO: 11 - protein, 106 aa, Mus musculus
EPTQGEARATEEPSGTDSDELIKSDQVNGVLVLSLLDKIIGAVDQIQLTQAQLEERQAEMEGAVQSIQGELSKLGKAHATTSNTVSKLLEKVRKVSVNVKTVRGSL

SEQ ID NO: 12 - protein, 289 aa, Mus musculus
QYKTKCESQSGFILHLRQLLSRGNTKFEALTVVIQHLLSEREEALKQHKTLSQELVSLRGELVAASSACEKLEKARADLQTAYQEFVQKLDQQHQTDRTELENRLKDLYTAECEKLQSIYIEEAEKYKTQLQEQFDNLNAAHETTKLEIEASHSEKVELLKKTYETSLSEIKKSHEMEKKSLEDLLNEKQESLEKQINDLKSENDALNERLKSEEQKQLSREKANSKNPQVMYLEQELESLKAVLEIKNEKLHQQDMKLMKMEKLVDNNTALVDKLKRFQQENEELNAR

SEQ ID NO: 13 - protein, 294 aa, Mus musculus
ATMLNILALVYRDQNKYKEAAHLLNDALSIRESTLGRDHPAVAATLNNLAVLYGKRGKYKEAEPLCQRALEIREKVLGTDHPDVAKQLNNLALLCQNQGKYEAVERYYQRALAIYESQLGPDNPNVARTKNNLASCYLKQGKYSEAEALYKEILTCAHVQEFGSVDDDHKPIWMHAEEREEMSRSRPRDSSAPYAEYGGWYKACRVSSPTVNTTLKNLGAPYRRQGKLEAAETLEECALRSRKQGTDPISQTKVAELLGEGDGRKAIQEGPGDSVKFEGGEDASVAVEWSGDGS

SEQ ID NO: 14 - protein, 351 aa, Mus musculus
QRATGGFTPDELLKVWKGLFYCMWMQDKPLQQEELGRTIAQLVHAFHTTEAQHQFLKAFWQTMIREWVGIDRLRLDKFYMLMRMVLSESLKAVKARGWDERQIEQLLELLTTEILNPDSQAPSGVKSHFLEIFLEELAKVGAAELTADQNLQFIDPFCQIAARTKDSQVLHKIIQSIFQTIVEQAPLAIEDIMNELDTQSGEGEASDGDDGEASDGDDGEASDDDDGEASDGGDGDVADSDDSDGADDDDGDVSDGDGGDNDEGDSNKSSEGEQDLQDTPPKKLPAGTAHRAGPEADKEQAWDDEENAGPVLQFDYEALANRLFKLASRQSTPSQNRKRLYKVIQKLRELA

SEQ ID NO: 15 - protein, 195 aa, Mus musculus
RRVKDDAAAHIASLKASHEREIEKLLCQNAIENSSSKVAELNRKIATQEVLLKHFQGQVNELQGKQESLAVSQVREEILQKQITKLLEELKEAKENHTPEMKHFMGLERKIKQMEMRHRQREQELQQIIQQTRQVVETEQNKEVEKWKRLAQLKNRELDKFRTELDSILDVLRELHRQGVVVPMALAGEENTAEF

SEQ ID NO: 16 - protein, 200 aa, Mus musculus
QFINELKATKKRLDSEMKELRQELIKLQGEKKTVEVEHSRLQKDMSLVHQQMAELEGHLQSVQKERDEMEIHLQSLKFDKEQMIALTEANETLKKQIEELQQEAKKAITEQKQKMKRLGSDLTSAQKEMKTKHKAYENAVSILGRRLQEALASKEATDAELNQLRAQSTGGSSDPVLHEKIRALEVELQNVGQSKIPREK

SEQ ID NO: 17 - protein, 320 aa, Mus musculus
HNGTFHCDEALACALLRLLPEYANAEIVRTRDPEKLASCDIVVDVGGEYNPQSHRYDHHQRTFTETMSSLCPGKPWQTKLSSAGLVYLHFGRKLLAQLLGTSEEDSVVDTIYDKMYENFVEEVDAVDNGISQWAEGEPRYAMTTTLSARVARLNPTWNQPNQDTEAGFRRAMDLVQEEFLQRLNFYQHSWLPARALVEEALAQRFKVDSSGEIVELAKGGCPWKEHLYHLESELSPKVAITFVIYTDQAGQWRVQCVPKEPHSFQSRLPLPEPWRGLRDKALDQVSGIPGCIFVHASGFIGGHHTREGALNMARATLAQR

SEQ ID NO: 18 - protein, 243 aa, Mus musculus
MSSQSMKLPPSNSALPNQALGSIAGLGTQNLNSVRQNGNPNMFGVGNTAAQPRGMQQPPAQPLSSSQPNLRAQVPPPLLSPQVPVSLLKYAPNNGGLNPLFGPQQVAMLNQLSQLNQLSQISQLQRLLAQQQRAQSQRSAPSANRQQQDQQGRPLSVQQQMMQQSRQLDPSLLVKQQTPPSQQPLHQPAMKSFLDNVMPHTTPELQKGPSPVNAFSNFPIGLNSNLNVNMDMNSIKEPQSRLR

SEQ ID NO: 19 - protein, 102 aa, Homo sapiens
ELFQWKTDGEPGPQGWSPRERAALQEELSDVLIYLVALAARCRVDLPLAVLSKMDINRRRYPAHLARSSSRKYTELPHGAISEDQAVGPADIPCDSTGQTST

SEQ ID NO: 20 - protein, 372 aa, Homo sapiens
EDYDLAKEKKQQMEQYRAEVYEQLELHSLLDAELMRRPFDLPLQPLARSGSPCHQKPMPSLPQLEERGTENQFAEPFLQEKPSSYSLTISPQHSAVDPLLPATDPHPKINAESLPYDERPLPAIRKHYGEAVVEPEMSNADISDARRGGMLGEPEPLTEKALREASSAIDVLGETLIAEAYCKTWSYREDALLALSKKLMEMPVGTPKEDLKNTLRASVFLVRRAIKDIVTSVFQASLKLLKMIITQYIPKHKLSKLETAHCVERTIPVLLTRTGDSSARLRVTAANFIQEMALFKEVKSLQIIPSYLVQPLKANSSVHLAMSQMGLLARLLKDLGTGSSGFTIDNVMKFSVSALEHRVYEVRETAVRIILD

SEQ ID NO: 21 - protein, 563 aa, Homo sapiens
IELKEHPAHERVLQDLVMDILRVLSTPDLEVRKKTLQLALDLVSSRNVEELVIVLKKEVIKTNNVSEHEDTDKYRQLLVRTLHSCSVRFPDMAANVIPVLMEFLSDNNEAAAADVLEFVREAIQRFDNLRMLIVEKMLEVFHAIKSVKIYRGALWILGEYCSTKEDIQSVMTEIRRSLGEIPIVESEIKKEAGELKPEEEITVGPVQKLVTEMGTYATQSALSSSRPTKKEEDRPPLRGFLLDGDFFVAASLATTLTKIALRYVALVQEKKKQNSFVAEAMLLMATILHLGKSSLPKKPITDDDVDRISLCLKVLSECSPLMNDIFNKECRQSLSHMLSAKLEEEKLSQKKESEKRNVTVQPDDPISFIQLTAKNEMNCKEDQFQLSLLAAMGNTQRKEAADPLASKLNKVTQLTGFSDPVYAEAYVHVNQYDIVLDVLVVNQTSDTLQNCTLELATLGDLKLVEKPSPLTLAPHDFANIKANVKVASTENGIIFGNIVYDVSGAASDRNCVVLSDIHIDIMDYIQPATCTDAEFRQMWAEFEWENKVTVNTNMVDLNDYLQH

SEQ ID NO: 22 - protein, 370 aa, Homo sapiens
RTLEDQMNEHRGKAEETQRSVNDLTSQRAKLQTENGELSRQLDEKEALISQLTRGKLTYTQQLEDLKRQLEEEVKAKNALAHALQSARHDCDLLREQYEEETEAKAELQRVLSKANSEVAQWRTKYETDAIQRTEELEEAKKKLAQRLQEPEEAVEAVNAKCSSLEKTKHRVPNEIEDLMVDVERSNAAAAALDKKQRNFDKILAEWKQKYEESQSELESSQKEARSLSTELFKLKNAYEESLEHLETFKRENKNLQEEISDLTEQLGSSGKTIHELEKVRKQLEAEKMELQSALEEAEASLEHEEGKILRAQLEFNQIKAEIERKLAEKDEEMEQAKRNHLRVVDSLQTSLDAETRSRNEALRVKKKME

SEQ ID NO: 23 - protein, 219 aa, Homo sapiens
ALMGVKNWPWMKLYFKIKPLLKSAEREKEMASMKEEFTRLKEALEKSEARRKELEEKMVSLLQEKNDLQLQVQAEQDNLADAEERCDQLIKNKIQLEAKVKEMNERLEDEEEMNAELTAKKRKLEDECSELKRDIDDLELTLAKVEKEKHATENKVKNLTEEMAGLDEIIAKLTKEKKALQEAHQQALDDLQAEEDKVNTLTKAKVKLEQQVDDLEGSL

SEQ ID NO: 24 - protein, 164 aa, Homo sapiens
DSINNLQAELNKIFALRKQLEQDVLSYQNLRKTLEEQISEIRRREEESFSLYSDQTSYLSICLEENNRFQVEHFSQEELKKKVSDLIQLVKELYTDNQHLKKTIFDLSCMGFQGNGFPDRLASTEQTELLASKEDEDTIKIGEDDEINFLSDQHLQQSNEIMKD

SEQ ID NO: 25 - protein, 427 aa, Homo sapiens
EKQELKQEIMNETFEYGSLFLGSASKTTTTSGRNISKPDSCGLRQIAAPKAKVGPPVSCLRRNSDNRNPSADRAVSPQRIRRVSSSAGNAAVIKYEEKPPKPAFQNGSSGSFYLKPLVSRAHVHLMKTPPKGPSRKNLFTALNAVEKSKQKNPRSLCIQPQTAPDALPPEKTLELTPYKTKCENQSGFILQLKQLLACGNTKFEALTVVIQHLLSEREEALKQHKTLSQELVNLRGELVTASTTREKLEKARNELQTVYEAFVQQHQAEKTERENRLKEFYTREYEKLRDTYIEEAEKYKMQLQEQFGNLNAAHETFKLEIEASHSEKLELLKKAYEASLSEIKKGHEIEKKSLEDLLSEKQESLEKQINDLKSENDALNEKLKSEEQKRRAREKANLKNPQIMYLEQELESLKAVLEIKNEKLHQQ

SEQ ID NO: 26 - protein, 447 aa, Mus musculus
EGEVDGKAIPDLTAPVAAMQAAVSNLVWVGKETVQTTEDQILKRDMPPAFIKVENACTKLVQAAQMLQSDPYSVPARDYLIDGSRGILSGTSDLLLTFDEAEVRKIIRVCKGILEYLTVAEVVETMEDLVTYTKNLGPGMTKMAKMIDERQQELTHQEHRVMLVNSMNTVKELLPVLISAMKIFVTSKNSKNQGIEEALKNRNFTVEKMSAEINEIIRVLQLTSWDEDAWASKDTEAMKRALASIDSKLNQAKGWLRDPNASPGDAGEQAIRQILDEAGKVGELCAGKERREILGTCKMLGQMTDQVAGLRARGQGASPVAMQKAQQVSQGLDVLTAKVENAARKLEAMTNSKQSIAKKIDAAQNWLADPNGGPEGEEQIRGALAEARKIAELCDDPKVRDDILRSLGEIAALTSKLGDLRRQGKGDSPEARALAKQVATALQNLQT

SEQ ID NO: 27 - protein, 1164 aa, Homo sapiens
MAGGEDRGDGEPVSVVTVRVQYLEDTDPFACANFPEPRRAPTCSLDGALPLGAQIPAVHRLLGAPLKLEDCALQVSPSGYYLDTELSLEEQREMLEGFYEEISKGRKPTLILRTQLSVRVNAILEKLYSSSGPELRRSLFSLKQIFQEDKDLVPEFVHSEGLSCLIRVGAAADHNYQSYILRALGQLMLFVDGMLGVVAHSDTIQWLYTLCASLSRLVVKTALKLLLVFVEYSENNAPLFIRAVNSVATTTGAPPWANLVSILEEKNGADPELLVYTVTLINKTLAALPDQDSFYDVTDALEQQGMDTLVQRHLGTAGTDVDLRTQLVLYENALKLEDGDIEEAPGAGGRRERRKPSSEEGKRSRRSLEGGGCPARAPEPGPTGPASPVGPTSSTGPALLTGPASSPVGPPSGLQASVNLFPTISVAPSADTSSERSIYKARFLENVAAAETEKQVALAQGRAETLAGAMPNEAGGHPDARQLWDSPETAPAARTPQSPAPCVLLRAQRSLAPEPKEPLIPASPKAEPIWELPTRAPRLSIGDLDFSDLGEDEDQDMLNVESVEAGKDIPAPSPPLPLLSGVPPPPPLPPPPPIKGPFPPPPPLPLAAPLPHSVPDSSALPTKRKTVKLFWRDVKLAGGHGVSASRFGPCATLWASLDPVSVDTARLEHLFESRAKEVLPSKKAGEGRRTMTTVLDPKRTNAINIGLTTLPPVHVIKAALLNFDEFAVSKDGIEKLLTMMPTEEERQKIEGAQLANPDIPLGPAENFLMTLASIGGLAARLQLWAFKLDYDSMEREIAEPLFDLKVGMEQLVQNATFRCILATLLAVGNFLNGSQSSGFELSYLEKVSDVKDTVRRQSLLHHLCSLVLQTRPESSDLYSEIPALTRCAKVDFEQLTENLGQLERRSRAAEESLRSLAKHELAPALRARLTHFLDQCARRVAMLRIVHRRVCNRFHAFLLYLGYTPQAAREVRIMQFCHTLREFALEYRTCRERVLQQQQKQATYRERNKTRGRMITETEKFSGVAGEAPSNPSVPVAVSSGPGRGDADSHASMKSLLTSRLEDTTHNRRSRGMVQSSSPIMPTVGPSTASPEEPPGSSLPSDTSDEIMDLLVQSVTKSSPRALAARERKRSRGNRKSLRRTLKSGLGDDLVQALGLSKGPGLEV

SEQ ID NO: 28 - protein, 488 aa, Mus musculus
MAETSLLEAGASAASTAAALENLQVEASCSVCLEYLKEPVIIECGHNFCKACITRWWEDLERDFPCPVCRKTSRYRSLRPNRQLGSMVEIAKQLQTVKRKIRDESLCSQHHEPLSLFCYEDQEAVCLICAISHTHRPHTVVPMDDATQEYKEKLQKCLEPLEQKLQEITCCKASEEKKPGELKRLVESRRQQILKEFEELHRRLDEEQQTLLSRLEEEEQDILQRLRENAAHLGDRRRDLAHLAAEVEGKCLQSGFEMLKDVKSTLEKCEKVKTMEVTSVSIELEKNFSNFPRQYFALRKILKQLIADVTLDPETAHPNLVLSEDRKSVKFVETRLRDLPDTPQRFTFYPCVLATEGFTSGRHYWEVEVGDKTHWAVGVCRDSVSRKGELTPLPETGYWRVRLWNGDKYAATTTPFTPLHIKVKPKRVGIFLDYEAGTLSFYNVTDRSHIYTFTDTFTEKLWPLFYPGIRAGRKNAAPLTIRPPTDWE

SEQ ID NO: 29 - protein, 509 aa, Mus musculus
MLSRALLCLALAWAARVGADALEEEDNVLVLKKSNFEEALAAHKYLLVEFYAPWCGHCKALAPEYAKAAAKLKAEGSEIRLAKVDATEESDLAQQYGVRGYPTIKFFKNGDTASPKEYTAGREADDIVNWLKKRTGPAATTLSDTAAAESLVDSSEVTVIGFFKDVESDSAKQFLLAAEAIDDIPFGITSNSGVFSKYQLDKDGVVLFKKFDEGRNNFEGEITKEKLLDFIKHNQLPLVIEFTEQTAPKIFGGEIKTHILLFLPKSVSDYDGKLSSFKRAAEGFKGKILFIFIDSDHTDNQRILEFFGLKKEECPAVRLITLEEEMTKYKPESDELTAEKITEFCHRFLEGKIKPHLMSQEVPEDWDKQPVKVLVGANFEEVAFDEKKNVFVEFYAPWCGHCKQLAPIWDKLGETYKDHENIIIAKMDSTANEVEAVKVHSFPTLKFFPASADRTVIDYNGERTLDGFKKFLESGGQDGAGDDEDLDLEEALEPDMEEDDDQKAVKDEL

SEQ ID NO: 30 - protein, 621 aa, Mus musculus
MGKKHKKHKSDRHFYEEYVEKPLKLVLKVGGSEVTELSTGSSGHDSSLFEDRSDHDKHKDRKRKKRKKGEKQAPGEEKGRKRRRVKEDKKKRDRDRAENEVDRDLQCHVPIRLDLPPEKPLTSSLAKQEEVEQTPLQEALNQLMRQLQSTMKEKIKNNDYQSIEELKDNFKLMCTNAMIYNKPETIYYKAAKKLLHSGMKILSQERIQSLKQSIDFMSDLQKTRKQKERTDACQSGEDSGCWQREREDSGDAETQAFRSPAKDNKRKDKDVLEDKWRSSNSEREHEQIERVVQESGGKLTRRLANSQCEFERRKPDGTTTLGLLHPVDPIVGEPGYCPVRLGMTTGRLQSGVNTLQGFKEDKRNRVTPVLYLNYGPYSSYAPHYDSTFANISKDDSDLIYSTYGEDSDLPNNFSISEFLATCQDYPYVMADSLLDVLTKGGHSRSLQDLDMSSPEDEGQTRALDTAKEAEITQIEPTGRLESSSQDRLTALQAVTTFGAPAEVFDSEEAEVFQRKLDETTRLLRELQEAQNERLSTRPPPNMICLLGPSYREMYLAEQVTNNLKELTQQVTPGDVVSIHGVRKAMGISVPSPIVGNSFVDLTGECEEPKETSTAECGPDAS

SEQ ID NO: 31 - protein, 2415 aa, Mus musculus
METPKETAVESSGPKVLETAEEIQHRRAEVLNQYQRFKDRVAERGQKLEESYHYQVFRRDADDLEKWIMEKLEIAKDKTYEPTNIQGKYQKHESFVSEVQAKSRVLPELEEIREARFAEDHFAHEATKTHLKQLRLLWDLLLELTQEKSDVLLRALKFYQYSQECEDILEWVKEKEAIVTLVELGDDWERTEVLHKKFEEFQEELTARKGKVDRVNQYANECAQEKHPKLPEIKAKQDEVNAAWDRLWSLALKRRESLSNAADLQRFKRDVNEAIQWMEEKEPQLTSEDYGKDLVSSEALFHNHKRLERNLAVMDDKVKELCAKADKLMISHSADAPQIQQMKLDLVSNWERIRALATNRYAKLKASYGYHRFLSDYDELSGWMKEKTALINADELPTDVASGEALLARHQQHKHEIDSYDDRFQSADATGQELLDGNHEASEEIREKMTILANDWAALLELWDKCQHQYRQCLDFHLFYRDSEQVDSWMSRQEAFLENEDLGNSVGSVEALLQKHDDFEEAFTAQEEKIITLDETATKLIDNDHYDSENIAAIRDGLLARRDALRERAATRRKLLVDSQLLQQLYQDSDDLKTWINKKKKLADDDDYKDVQNLKSRVQKQQDFEEELAVNEIMLNNLEKTGQEMIEDGHYASEAVAARLSEVANLWKELLEATAQKGTQLYEANQLLQFENNAEDLKRWLEEVEWQVTSEDYGKGLADVQNLLRKHGLLESDVTARQNQVDTLTDMAAHFEEIGHPDSGDIRARQESLLSRFEALKEPLAIRKKKLIDLLKLQQICRDSEDEEAWIQETEPSAASTHLGKDLVAAKNLLNRHEVILADIASHEPRIQVITERGNKMVEEGHFAAEDIASRVESLNKNMESLHARAIRRENDLKANVQLQQYLADLHEAEAWIKEKEPIVDNKNYGADEEAAGALLKKHEAFLVDLNAFENSIKALRDQAEVCQQQQAAPVDEAGREARVIALYDFEARSRREVSMKKNDVLTLLSSINKDWWKVEADDHQGFVPAVYVRKLAPDELPGFPQHRQEEPVNIPQLQQQVETLYHSLLDRAEERRRRLLQRYNEFLLAYEAGDMLEWIQEKKTENTGVELDDVWELQKKFDEFQRDLKSNEPRLKDINKVADELLFEELLTPEGAHIRQELNTRWNSLKRLADEQYQLLSSAHAVEMFHREADDVKEQIDKKCRALNAADPGSDLLSVQALQRQHEVFERDIIPLGEKVTTLGETAERLCESHPDATEDLQKQRTELNEAWDTLQGLTSDRKESLNEAHKFFLFLSKASDLENWIKTIGGVISSPELAEDLTGTEILLERHQEHHDDIKREDPTFQALEDFGTELIDSGHRNRREIDNTLQNINSKRDNLEKSWENRKKMLDQCLELQLFRGKCDQVESWMVARENSLRSDDRDHLNSLQALMKKRDDLDKAITAQEGKISDLENVATRLIDNDHYAKEEIAARLQRVLDRWKALKEQLLTELGKLGDYADLKQFYRDLEDLEEWINEMLPIACDESYKDPTNIQRKYLKHQAFENEVNGRAEQVDGVINLGNSLIERRVCDGDEENMQEQLDKLKENWDYLLERTTDKGQKLNEASRQQRFNTSIRDFEFWLSEAEGLLAMKDQARDLTSAGNLLKKHQLLEAEMLAREDPLKDLNDLAQELISSGTFNIDQIEEKMNGVNERFENVQSLAAAHHEKLKETYALFQFFQDLDDEEAWIEEKLLRVSSQDYGRDLQSVQNLLKKHKRLEGELVAHEPAVQNVLDTAESLRDKAAVGKEEIQERLAQFVQHWEKLKELAKTRGVNLEESLEYLQFMENAEEEEAWLGEKCALVSRGDSGDTLAATQSLLKKHEALENDFAVHKNRVQDVCAQGEDILNKEETQNKDKISTKIQVLNEKTASLAKALAAWKSQLDDVHAFQQFNWKADVVESWIGEKEASLKTKSNGADLTAFLTLLAKHDTLDASLQSFQQERLSEIAELKDQLVAGEHSQAKAIEEQHAALLRHWEQLLEASRVHRQKLLEKQLPLQKAEELFMEFAHKASAFNNWCENAEEDLSEPVHCVSLNEIRQLQKEHEAFLASLAGAQEDFNYLLELDKQIKALNVPSSPYTWLTVDVLGRIWNHLPDIIKEREQELQKEEARQIKNFEMCQEFEQNASAFLQWIQETRAYFLDGSLLKETGTLESQLEANKRKQKEIQAMKRHLTKIEDLGDSMEEALILDIKYSTIGLAQQWDQLHQLGMRMQHNLEQQIQAKDTIGVSEETLKEFSTTYKHFDENLTGRLTHKEFRSCLRGLNYYLPMVEEGEPEPKFEKFLNAVDPGRKGYVSLEDYTSFLIDKESENIKTSDDIESAFQALAEGKAYITKEDMKQALTPEQVSFCTIHMQQYMDPRGRSQPAGYDYVGFTNSFFGN

SEQ ID NO: 32 - protein, 806 aa, Mus musculus
MASGADSKGDDLSTAILKQKNRPNRLIVDEAINEDNSVVSLSQPKMDELQLFRGDTVLLKGKKRREAVCIVLSDDTCSDEKIRMNRVVRNNLRVRLGDVISIQPCPDVKYGKRIHVLPIDDTVEGITGNLFEVYLKPYFLEAYRPIRKGDIFLVRGGMRAVEFKVVETDPSPYCIVAPDTVIHCEGEPIKREDEEESLNEVGYDDVGGCRKQLAQIKEMVELPLRHPALFKAIGVKPPRGILLYGPPGTGKTLIARAVANETGAFFFLINGPEIMSKLAGESESNLRKAFEEAEKNAPAIIFIDELDAIAPKREKTHGEVERRIVSQLLTLMDGLKQRAHVIVMAATNRPNSIDPALRRFGRFDREVDIGIPDATGRLEILQIHTKNMKLADDVDLEQVANETHGHVGADLAALCSEAALQAIRKKMDLIDLEDETIDAEVMNSLAVTMDDFRWALSQSNPSALRETVVEVPQVTWEDIGGLEDVKRELQELVQYPVEHPDKFLKFGMTPSKGVLFYGPPGCGKTLLAKAIANECQANFISIKGPELLTMWFGESEANVREIFDKARQAAPCVLFFDELDSIAKARGGNIGDGGGAADRVINQILTEMDGMSTKKNVFIIGATNRPDIIDPAILRPGRLDQLIYIPLPDEKSRVAILKANLRKSPVAKDVDLEFLAKMTNGFSGADLTEICQRACKLAIRESIESEIRRERERQTNPSAMEVEEDDPVPEIRRDHFEEAMRFARRSVSDNDIRKYEMFAQTLQQSRGFGSFRFPSGNQGGAGPSQGSGGGTGGSVYTEDNDDDLYG

SEQ ID NO: 33 - protein, 793 aa, Mus musculus
MAGWIQAQQLQGDALRQMQVLYGQHFPIEVRHYLAQWIESQPWDAIDLDNPQDRGQATQLLEGLVQELQKKAEHQVGEDGFLLKIKLGHYATQLQNTYDRCPMELVRCIRHILYNEQRLVREANNCSSPAGVLVDAMSQKHLQINQRFEELRLITQDTENELKKLQQTQEYFIIQYQESLRIQAQFAQLGQLNPQERMSRETALQQKQVSLETWLQREAQTLQQYRVELAEKHQKTLQLLRKQQTIILDDELIQWKRRQQLAGNGGPPEGSLDVLQSWCEKLAEIIWQNRQQIRRAEHLCQQLPIPGPVEEMLAEVNATITDIISALVTSTFIIEKQPPQVLKTQTKFAATVRLLVGGKLNVHMNPPQVKATIISEQQAKSLLKNENTRNECSGEILNNCCVMEYHQATGTLSAHFRNMSLKRIKRADRRGAESVTEEKFTVLFESQFSVGSNELVFQVKTLSLPVVVIVHGSQDHNATATVLWDNAFAEPGRVPFAVPDKVLWPQLCEALNMKFKAEVQSNRGLTKENLVFLAQKLFNISSNHLEDYNSMSVSWSQFNRENLPGWNYTFWQWFDGVMEVLKKHHKPHWNDGAILGFVNKQQAHDLLINKPDGTFLLRFSDSEIGGITIAWKFDSPDRNLWNLKPFTTRDFSIRSLADRLGDLNYLIYVFPDRPKDEVFAKYYTPVLAKAVDGYVKPQIKQVVPEFVNASTDAGASATYMDQAPSPVVCPQPHYNMYPPNPDPVLDQDGEFDLDESMDVARHVEELLRRPMDSLDARLSPPAGLFTSARSSLS

SEQ ID NO: 34 - protein, 392 aa, Mus musculus
MEDVTLHIVERPYSGFPDASSEGPEPTQGEARATEEPSGTGSDELIKSDQVNGVLVLSLLDKIIGAVDQIQLTQAQLEERQAEMEGAVQSIQGELSKLGKAHATTSNTVSKLLEKVRKVSVNVKTVRGSLERQAGQIKKLEVNEAELLRRRNFKVMIYQDEVKLPAKLSVSKSLKESEALPEKEGDELGEGERPEDDTAAIELSSDEAVEVEEVIEESRAERIKRSGLRRVDDFKKAFSKEKMEKTKVRTRENLEKTRLKTKENLEKTRHTLEKRMNKLGTRLVPVERREKLKTSRDKLRKSFTPDHVVYARSKTAVYKVPPFTFHVKKIREGEVEVLKATEMVEVGPEDDEVGAERGEATDLLRGSSPDVHTLLEITEESDAVLVDKSDSD

SEQ ID NO: 35 - protein, 439 aa, Mus musculus
MLLSPKFSLSTIHVRLTAKGLRNLRLPPGLRKNTVIFHTVEKGRQKNPRSLCIQTQTAPDVLSSERTLELAQYKTKCESQSGFILHLRQLLSRGNTKFEALTVVIQHLLSEREEALKQHKTLSQELVSLRGELVAASSACEKLEKARTDLQTAYQEFVQKLNQQHQTDRTELENRLKDLYTAECEKLQSIYIEEAEKYKTQLQEQFDNLNAAHETTKLEIEASHSEKVELLKKTYETSLSEIKKSHEMEKKSLEDLLNEKQESLEKQINDLKSENDALNERLKSEEQKQLSREKANSKNPQVMYLEQELESLKAVLEIKNEKLHQQDMKLMKMEKLVDNNTALVDKLKRFQQENEELKARMDKHMAISRQLSTEQAALQESLEKESKVNKRLSMENEELLWKLHNGDLCSPKRSPTSSAIPFQSPRNSGSFSSPSISPR

SEQ ID NO: 36 - protein, 619 aa, Mus musculus
MSGLVLGQRDEPAGHRLSQEEILGSTKVVSQGLEALHSEHQAVLQSLSHTIECLQQGGHEEGLVHEKARQLRRSMENIELGLSEAQVMLALASHLSTVESEKQKLRAQVRRLCQENQWLRDELAGTQQRLQRSEQAVAQLEEEKKHLEFLRQLRQYDEDGHGMEEKEGEATKDSLDDLFPNEEEEDSGNDLSRGQGAAAAQQGGYEIPARLRTLHNLVIQYAAQGRYEVAVPLCKQALEDLERTSGRGHPDVATMLNILALVYRDQNKYKEAAHLLNDALSIRESTLGRDHPAVAATLNNLAVLYGKRGKYKEAEPLCQRALEIREKVLGTDHPDVAKQLNNLALLCQNQGKYEAVERYYQRALAIYESQLGPDNPNVARTKNNLASCYLKQGKYSEAEALYKEILTCAHVQEFGSVDDDHKPIWMHAEEREEMSRSRPRDSSAPYAEYGGWYKACRVSSPTVNTTLKNLGALYRRQGKLEAAETLEECALRSRKQGTDPISQTKVAELLGEGDGRKAIQEGPGDSVKFEGGEDASVAVEWSGDGSGTLQRSGSLGKIRDVLRRSSELLVRKLQGTEPRPSSSSMKRAASLNYLNQPNAAPLQVSRGLSASTVDLSSSS

SEQ ID NO: 37 - protein, 494 aa, Mus musculus
MVPGVPLPPEIQLAQRLAGNEQVTRDRALRKLRKYIEARSQRATGGFTPDELLKVWKGLFYCMWMQDKPLQQEELGRTIAQLVHAFHTTEAQHQFLKAFWQTMIREWVGIDRLRLDKFYMLMRMVLSESLKAVKARGWDERQIEQLLELLTTEILNPDSQAPSGVKSHFLEIFLEELAKVGAAELTADQNLQFIDPFCQIAARTKDSQVLHKIIQSIFQTIVEQAPLAIEDIMNELDTQSGEGEASDGDDGEASDGDDGEASDDDDGEASDGGDGDVADSDDSDGADDDDGDVSDGDGGDNDEGDSNKSSEGEQDLQDTPPKKLPAGTAHRAGPEADKEQAWDDEENAGPVLQFDYEALANRLFKLASRQSTPSQNRKRLYKVIQKLRELAGGTFPEDDVPEKAYKKMLEGRRERKKKKKRLPKPQPQNKEAGSEAESSSADPGPGRKRKRNRKTDEKAGQGGPPGKRRKPGARAKGAGAQQPKKRIQSSQSAE

SEQ ID NO: 38 - protein, 1447 aa, Mus musculus
MDGASAKQDGLWESKSSSDVSSCPEASLETVGSLARLPDQQDTAQDASVEVNRGFKEEGSPDRSSQVAICQNGQIPDLQLSLDPTTSPVGPDASTGSTASSLPLEKEEQVRLQARKRLEEQLMQYRVKRHRERSSQPATKMKLFSTLDPELMLNPENLPRASTVAVTKEYSFLRTSVPRGPKVGSLGLLAHSKEKKNSKSSKIRSLADYRTEDPSDSGGLGSTADAVGSSLKQSRSSTSVVSEVSPSSETDNRVESASMTGDSVSEADGNESDSSSHSSLSARGACGVLGNVGMPGTAYMVDGQEISAEALGQFPSIKDVLQAAAAQHQDQNQEANGEVRSRRDSICSSVSMESSLAEPQDELLQILKDKRRLEGQVEALSLEASQALQEKAELQAQLAALSTRLQAQVEHSHSSQQKQDSLSSEVDTLKQSCWDLGRAMTDLQSMLEAKNASLASSNNDLQVAEEQYQRLMAKVEDMQRNILSKDNTVHDLRQQMTALQSQLQQVQLERTTLTSKLQASQAEITSLQHARQWYQQQLTLAQEARVRLQGETAHIQVGQMTQAGLLEHLKLENVSLSHQLTETQHRSIKEKERIAVQLQSIEADMLDQEAAFVQIREAKTMVEEDLQRRLEEFEGEREQLQKVADAAASLEQQLEQVKLTLFQRDQQLAALQQEHLDVIKQLTSTQEALQAKGQSLDDLHTRYDELQARLEELQREADSREDAIHFLQNEKIVLEVALQSAKSDKEELDRGARRLEEDTEETSGLLEQLRQDLAVKSNQVEHLQQETATLRKQMQKVKEQFVLQKVMVEAYRRDATSKDQLINELKATKKRLDSEMKELRQELIKLQGEKKTVEVEHSRLQKDMSLVHQQMAELEGHLQSVQKERDEMEIHLQSLKFDKEQMIALTEANETLKKQIEELQQEAKKAITEQKQKMKRLGSDLTSAQKEMKTKHKAYENAVSILSRRLQEALASKEATDAELNQLRAQSTGGSSDPVLHEKIRALEVELQNVGQSKILLEKELQEVITMTSQELEESREKVLELEDELQESRGFRRKIKRLEESNKKLALELEHERGKLTGLGQSNAALREHNSILETALAKREADLVQLNLQVQAVLQRKEEEDRQMKQLVQALQVSLEKEKMEVNSLKEQMAAARIEAGHNRRHFKAATLELSEVKKELQAKEHLVQTLQAEVDELQIQDGKHSQEIAQFQTELAEARTQLQLLQKKLDEQMSQQPTGSQEMEDLKWELDQKEREIQSLKQQLDLTEQQGKKELEGTQQTLQTIKSELEMVQEDLSETQKDKFMLQAKVSELKNNMKTLLQQNQQLKLDLRRGAAKKKEPKGESNSSSPATPIKIPDCPVPASLLEELLRPPPAVSKEPLKNLNNCLQQLKQEMDSLQRQMEEHTITVHESLSSWAQVEAAPAEHAHPRGDTKLHNQNSVPRDGLGQ

SEQ ID NO: 39 - protein, 380 aa, Mus musculus
MGRRFLRGILTLPLRSVLQAQHRMLGSEQDPPAKRPRNNLMAPPRIGTHNGTFHCDEALACALLRLLPEYANAEIVRTRDPEKLASCDIVVDVGGEYNPQSHRYDHHQRTFTETMSSLCPGKPWQTKLSSAGLVYLHFGRKLLAQLLGTSEEDSVVDTIYDKMYENFVEEVDAVDNGISQWAEGEPRYAMTTTLSARVARLNPTWNQPNQDTEAGFRRAMDLVQEEFLQRLNFYQHSWLPARALVEEALAQRFKVDSSGEIVELAKGGCPWKEHLYHLESELSPKVAITFVIYTDQAGQWRVQCVPKEPHSFQSRLPLPEPWRGLRDKALDQVSGIPGCIFVHASGFIGGHHTREGALNMARATLAQRPAPVPLANAVVQ

SEQ ID NO: 40 - protein, 668 aa, Mus musculus
MSSQSMKLPPSNSALPNQALGSIAGLGTQNLNSVRQNGNPNMFGVGNTAAQPRGMQQPPAQPLSSSQPNLRAQVPPPLLSPQVPVSLLKYAPNNGGLNPLFGPQQVAMLNQLSQLNQLSQISQLQRLLAQQQRAQSQRSAPSANRQQQDQQGRPLSVQQQMMQQSRQLDPSLLVKQQTPPSQQPLHQPAMKSFLDNVMPHTTPELQKGPSPVNAFSNFPIGLNSNLNVNMDMNSIKEPQSRLRKWTTVDSMSVNTSLDQNSSKHGAISSGFRLEESPFVPYDFMNSSTSPASPPGSIGDGWPRAKSPNGSSSVNWPPEFRPGEPWKGYPNIDPETDPYVTPGSVINSLSINTVREVDHLRDRNSGSSSSLNTTLPSTSAWSSIRASNYNVPLSSTAQSTSARNSDSKLTWSPGSVTNTSLAHELWKVPLPPKNITAPSRPPPGLTGQKPPLSTWDNSPLRVGGGWGNSDARYTPGSSWGESSSGRITNWLVLKNLTPQIDGSTLRTLCMQHGPLITFHLNLPHGNALVRYSSKEEVVKAQKSLHMCVLGNTTILAEFASEEEISRFFAQSQSLTPSPGWQSLGSSQSRLGSLDCSHSFSSRTDVNHWNGAGLSGANCGDLHGTSLWGTPHYSTSLWGPPSSDPRGISSPSPINAFLSVDHLGGGGESM

SEQ ID NO: 41 - protein, 170 aa, Homo sapiens
MSVAGGEIRGDTGGEDTAAPGRFSFSPEPTLEDIRRLHAEFAAERDWEQFHQPRNLLLALVGEVGELAELFQWKTDGEPGPQGWSPRERAALQEELSDVLIYLVALAARCRVDLPLAVLSKMDINRRRYPAHLARSSSRKYTELPHGAISEDQAVGPADIPCDSTGQTST

SEQ ID NO: 42 - protein, 925 aa, Homo sapiens
MPHKIGFVVVSSSGHEDGFSARELMIHAPTVSGWRSPRFCQFPQEIVLQMVERCRIRKLQLLAHQYMISSKIEFYISESLPEYFAPYQAERFRRLGYVSLCDNEKTGCKARELKSVYVDAVGQFLKLIFHQNHVNKYNIYNQVALVAINIIGDPADFSDESNTASREKLIDHYLGHNSEDPALEGTYARKSDYISPLDDLAFDMYQDPEVAQIIRKLDERKREAVQKERYDYAKKLKQAIADLQKVGERLGRYEVEKRCAVEKEDYDLAKEKKQQMEQYRAEVYEQLELHSLLDAELMRRPFDLPLQPLARSGSPCHQKPMPSLPQLEERGTENQFAEPFLQEKPSSYSLTISPQHSAVDPLLPATDPHPKINAESLPYDERPLPAIRKHYGEAVVEPEMSNADISDARRGGMLGEPEPLTEKALREASSAIDVLGETLVAEAYCKTWSYREDALLALSKKLMEMPVGTPKEDLKNTLRASVFLVRRAIKDIVTSVFQASLKLLKMIITQYIPKHKLSKLETAHCVERTIPVLLTRTGDSSARLRVTAANFIQEMALFKEVKSLQIIPSYLVQPLKANSSVHLAMSQMGLLARLLKDLGTGSSGFTIDNVMKFSVSALEHRVYEVRETAVRIILDMYRQHQASILEYLPPDDSNTRRNILYKTIFEGFAKIDGRATDAEMRARRKAATEEAEKQKKEEIKALQGQLAALKEIQAEVQEKESDAVKPKNQDIQGGKAAPAEALGIPDEHYLDNLCIFCGERSESFTEEGLDLHYWKHCLMLTRCDHCKQVVEISSLTEHLLTECDKKDGFGKCYRCSEAVFKEELPRHIKHKDCNPAKPEKLANRCPLCHENFSPGEEAWKAHLMGPAGCTMNLRKTHILQKAPALQPGKSSAVAASGPLGSKAGSKIPTPKGGLSKSSSRTYAKR

SEQ ID NO: 43 - protein, 953 aa, Homo sapiens
MTAAENVCYTLINVPMDSEPPSEISLKNDLEKGDVKSKTEALKKVIIMILNGEKLPGLLMTIIRFVLPLQDHTIKKLLLVFWEIVPKTTPDGRLLHEMILVCDAYRKDLQHPNEFIRGSTLRFLCKLKEAELLEPLMPAIRACLEHRHSYVRRNAVLAIYTIYRNFEHLIPDAPELIHDFLVNEKDASCKRNAFMMLIHADQDRALDYLSTCIDQVQTFGDILQLVIVELIYKVCHANPSERARFIRCIYNLLQSSSPAVKYEAAGTLVTLSSAPTAIKAAAQCYIDLIIKESDNNVKLIVLDRLIELKEHPAHERVLQDLVMDILRVLSTPDLEVRKKTLQLALDLVSSRNVEELVIVLKKEVIKTNNVSEHEDTDKYRQLLVRTLHSCSVRFPDMAANVIPVLMEFLSDNNEAAAADVLEFVREAIQRFDNLRMLIVEKMLEVFHAIKSVKIYRGALWILGEYCSTKEDIQSVMTEIRRSLGEIPIVESEIKKEAGELKPEEEITVGPVQKLVTEMGTYATQSALSSSRPTKKEEDRPPLRGFLLDGDFFVAASLATTLTKIALRYVALVQEKKKQNSFVAEAMLLMATILHLGKSSLPKKPITDDDVDRISLCLKVLSECSPLMNDIFNKECRQSLSHMLSAKLEEEKLSQKKESEKRNVTVQPDDPISFMQLTAKNEMNCKEDQFQLSLLAAMGNTQRKEAADPLASKLNKVTQLTGFSDPVYAEAYVHVNQYDIVLDVLVVNQTSDTLQNCTLELATLGDLKLVEKPSPLTLAPHDFANIKANVKVASTENGIIFGNIVYDVSGAASDRNCVVLSDIHIDIMDYIQPATCTDAEFRQMWAEFEWENKVTVNTNMVDLNDYLQHILKSTNMKCLTPEKALSGYCGFMAANLYARSIFGEDALANVSIEKPIHQGPDAAVTGHIRIRAKSQGMALSLGDKINLSQKKTSI

SEQ ID NO: 44 - protein, 1935 aa, Homo sapiens
MGDSEMAVFGAAAPYLRKSEKERLEAQTRPFDLKKDVFVPDDKQEFVKAKIVSREGGKVTAETEYGKTVTVKEDQVMQQNPPKFDKIEDMAMLTFLHEPAVLYNLKDRYGSWMIYTYSGLFCVTVNPYKWLPVYTPEVVAAYRGKKRSEAPPHIFSISDNAYQYMLTDRENQSILITGESGAGKTVNTKRVIQYFAVIAAIGDRSKKDQSPGKGTLEDQIIQANPALEAFGNAKTVRNDNSSRFGKFIRIHFGATGKLASADIETYLLEKSRVIFQLKAERDYHIFYQILSNKKPELLDMLLITNNPYDYAFISQGETTVASIDDAEELMATDNAFDVLGFTSEEKNSMYKLTGAIMHFGNMKFKLKQREEQAEPDGTEEADKSAYLMGLNSADLLKGLCHPRVKVGNEYVTKGQNVQQVIYATGALAKAVYERMFNWMVTRINATLETKQPRQYFIGVLDIAGFEIFDFNSFEQLCINFTNEKLQQFFNHHMFVLEQEEYKKEGIEWTFIDFGMDLQACIDLIEKPMGIMSILEEECMFPKATDMTFKAKLFDNHLGKSANFQKPRNIKGKPEAHFSLIHYAGIVDYNIIGWLQKNKDPLNETVVGLYQKSSLKLLSTLFANYAGADAPIEKGKGKAKKGSSFQTVSALHRENLNKLMTNLRSTHPHFVRCIIPNETKSPGVMDNPLVMHQLRCNGVLEGIRICRKGFPNRILYGDFRQRYRILNPAAIPEGQFIDSRKGAEKLLSSLDIDHNQYKFGHTKVFFKAGLLGLLEEMRDERLSRIITRIQAQSRGVLARMEYKKLLERRDSLLVIQWNIRAFMGVKNWPWMKLYFKIKPLLKSAEREKEMASMKEEFTRLKEALEKSEARRKELEEKMVSLLQEKNDLQLQVQAEQDNLADAEERCDQLIKNKIQLEAKVKEMNERLEDEEEMNAELTAKKRKLEDECSELKRDIDDLELTLAKVEKEKHATENKVKNLTEEMAGLDEIIAKLTKEKKALQEAHQQALDDLQAEEDKVNTLTKAKVKLEQQVDDLEGSLEQEKKVRMDLERAKRKLEGDLKLTQESIMDLENDKQQLDERLKKKDFELNALNARIEDEQALGSQLQKKLKELQARIEELEEELESERTARAKVEKLRSDLSRELEEISERLEEAGGATSVQIEMNKKREAEFQKMRRDLEEATLQHEATAAALRKKHADSVAELGEQIDNLQRVKQKLEKEKSEFKLELDDVTSNMEQIIKAKANLEKMCRTLEDQMNEHRSKAEETQRSVNDLTSQRAKLQTENGELSRQLDEKEALISQLTRGKLTYTQQLEDLKRQLEEEVKAKNALAHALQSARHDCDLLREQYEEETEAKAELQRVLSKANSEVAQWRTKYETDAIQRTEELEEAKKKLAQRLQEAEEAVEAVNAKCSSLEKTKHRLQNEIEDLMVDVERSNAAAAALDKKQRNFDKILAEWKQKYEESQSELESSQKEARSLSTELFKLKNAYEESLEHLETFKRENKNLQEEISDLTEQLGSSGKTIHELEKVRKQLEAEKMELQSALEEAEASLEHEEGKILRAQLEFNQIKAEIERKLAEKDEEMEQAKRNHLRVVDSLQTSLDAETRSRNEALRVKKKMEGDLNEMEIQLSHANRMAAEAQKQVKSLQSLLKDTQIQLDDAVRANDDLKENIAIVERRNNLLQAELEELRAVVEQTERSRKLAEQELIETSERVQLLHSQNTSLINQKKKMDADLSQLQTEVEEAVQECRNAEEKAKKAITDAAMMAEELKKEQDTSAHLERMKKNMEQTIKDLQHRLDEAEQIALKGGKKQLQKLEARVRELENELEAEQKRNAESVKGMRKSERRIKELTYQTEEDRKNLLRLQDLVDKLQLKVKAYKRQAEEAEEQANTNLSKFRKVQHELDEAEERADIAESQVNKLRAKSRDIGTKGLNEE

SEQ ID NO: 45 - protein, 1561 aa, Homo sapiens
KVEELNSEIEKLSAAFAKAREALQKAQTQEFQGSEDYETALSGKEALSAALRSQNLTKSTENHRLRRSIKKITQELSDLQQERERLEKDLEEAHREKSKGDCTIRDLRNEVEKLRNEVNEREKAMENRYKSLLSESNKKLHNQEQVIKHLTESTNQKDVLLQKFNEKDLEVIQQNCYLMAAEDLELRSEGLITEKCSSQQPPGSKTIFSKEKKQSSDYEELIQVLKKEQDIYTHLVKSLQESDSINNLQAELNKIFALRKQLEQDVLSYQNLRKTLEEQISEIRRREEESFSLYSDQTFYLSICLEENNRFQVEHFSQEELKKKVSDLIQLVKELYTDNQHLKKTIFDLSCMGFQGNGFPDRLASTEQTELLASKEDEDTIKIGEDDEINFLSDQHLQQSNEIMKDLSKGGCKNGYLRHTESKISDCDGAHAPGCLEEGAFINLLAPLFNEKATLLLESRPDLLKVVRELLLGQLFLTEQEVSGEHLDGKTEKTPKQKGELVHFVQTNSFSKPHDELKLSCEAQLVKAGEVPKVGLKDASVQTVATEGDLLRFKHEATREAWEEKPINTALSAEHRPENLHGVPGWQAALLSLPGITNREAKKSRLPILIKPSRSLGNMYRLPATQEVVTQLQSQILELQGELKEFKTCNKQLHQKLILAEAVMEGRPTPDKTLLNAQPPVGAAYQDSPGEQKGIKTTSSVWRDKEMDSDQQRSYEIDSEICPPDDLASLPSCKENPEDVLSPTSVATYLSSKSQPSAKVSVMGTDQSESINTSNETEYLKQKIHDLETELEGYQNFIFQLQKHSQCSEAIITVLCGTEGAQDGLSKPKNGSDGEEMTFSSLHQVRYVKHVKILGPLAPEMIDSRVLENLKQQLEEQEYKLQKEQNLNMQLFSEIHNLQNKFRDLSPPRYDSLVQSQARELSLQRQQIKDGHGICVISRQHMNTMIKAFEELLQASDVDYCVAEGFQEQLNQCAELLEKLEKLFLNGKSVGVEMNTQNELMERIEEDNLTYQHLLPESPEPSASHALSDYETSEKSFFSRDQKQDNETEKTSVMVNSFSQDLLMEHIQEIRTLRKRLEESIKTNEKLRKQLERQGSEFVQGSTSIFASGSELHSSLTSEIHFLRKQNQALNAMLIKGSRDKQKENDKLRESLSRKTVSLEHLQREYASVKEENERLQKEGSEKERHNQQLIQEVRCSGQELSRVQEELKLRQQLLSQNDKLLQSLRVELKAYEKLDEEHRRLREASGEGWKGQDPFRDLHSLLMEIQALRLQLERSIETSSTLQSRLKEQLARGAEKAQEGALTLAVQAVSIPEVPLQPDKHDGDKYPMESDNSFDLFDSSQAVTPKSVSETPPLSGNDTDSLSCDSGSSATSTPCVSRLVTGHHLWASKNGRHVLGLIEDYEALLKQISQGQRLLAEMDIQTQEAPSSTSQELGTKGPHPAPLSKFVSSVSTAKLTLEEAYRRLKLLWRVSLPEDGQCPLHCEQIGEMKAEVTKLHKKLFEQEKKLQNTMKLLQLSKRQEKVIFDQLVVTHKILRKARGNLELRPGGAHPGTCSPSRPGS

SEQ ID NO: 46 - protein, 1191 aa, Homo sapiens
THAYNPKSPPTQNSSASSVNWNSANPDDMVVDYETDPAVVTGENISLSLQGVEVFGHEKSSSDFISKQVLDMHKDSICQCPALVGTEKPKYLQHSCHSLEAVEGQSVEPSLPFVWKPNDNLNCAGYCDALELNQTFDMTVDKVNCTFISHHAIGKSQSFHTAGSLPPTGRRSGSTSSLSYSTWTSSHSDKTHARETTYDRESFENPQVTPSEAQDMTYTAFSDVVMQSEVFVSDIGNQCACSSGKVTSEYTDGSQQRLVGEKETQALTPVSDGMEVPNDSALQEFFCLSHDESNSEPHSQSSYRHKEMGQNLRETVSYCLIDDECPLMVPAFDKSEAQVLNPEHKVTETEDTQMVSKGKDLGTQNHTSELILSSPPGQKVGSSFGLTWDANDMVISTDKTMCMSTPVLEPTKVTFSVSPIEATEKCKKVEKGNRGLKNIPDSKEAPVNLCKPSLGKSTIKTNTPIGCKVRKTEIISYPRPNFKNVKAKVMSRAVLQPKDAALSKVTPRPQQTSASSPSSVNSRQQTVLSRTPRSDLNADKKAEILINKTHKQQFNKLITSQAVHVTTHSKNASHRVPRTTSAVKSNQEDVDKASSSNSACETGSVSALFQKIKGILPVKMESAECLEMTYVPNIDRISPEKKGEKENGTSMEKQELKQEIMNETFEYGSLFLGSASKTTTTSGRNISKPDSCGLRQIAAPKAKVGPPVSCLRRNSDNRNPSADRAVSPQRIRRVSSSSGNAAVIKYEEKPPKPAFQNGSSGSFYLKPLVSRAHVHLMKTPPKGPSRKNLFTALNAVEKSRQKNPRSLCIQPQTAPDALPPEKTLELTQYKTKCENQSGFILQLKQLLACGNTKFEALTVVIQHLLSEREEALKQHKTLSQELVNLRGELVTASTTCEKLEKARNELQTVYEAFVQQHQAEKTERENRLKEFYTREYEKLRDTYIEEAEKYKMQLQEQFDNLNAAHETSKLEIEASHSEKLELLKKAYEASLSEIKKGHEIEKKSLEDLLSEKQESLEKQINDLKSENDALNEKLKSEEQKRRAREKANLKNPQIMYLEQELESLKAVLEIKNEKLHQQDIKLMKMEKLVDNNTALVDKLKRFQQENEELKARMDKHMAISRQLSTEQAVLQESLEKESKVNKRLSMENEELLWKLHNGDLCSPKRSPTSSAIPLQSPRNSGSFPSPSISPR

SEQ ID NO: 47 - protein, 1066 aa, Mus musculus
MPVFHTRTIESILEPEAQQISHLVIMHEEGEVDGKAIPDLTAPVAAVQAAVSNLVRVGKETVQTTEDQILKRDMPPAFIKVENACTKLVQAAQMLQSDPYSVPARDYLIDGSRGILSGTSDLLLTFDEAEVRKIIRVCKGILEYLTVAEVVETMEDLVTYTKNLGPGMTKMAKMIDERQQELTHQEHRVMLVNSMNTVKELLPVLISAMKIFVTSKNSKNQGIEEALKNRNFTVEKMSAEINEIIRVLQLTSWDEDAWASKDTEAMKRALASIDSKLNQAKGWLRDPNASPGDAGEQAIRQILDEAGKVGELCAGKERREILGTCKMLGQMTDQVADLRARGQGASPVAMQKAQQVSQGLDVVTAKVENAARKLEAMTNSKQSIAKKIDAAQNWLADPNGGPEGEEQIRGALAEARKIAELCDDPKERDDILRSLGEIAALTSKLGDLRRQGKGDSPEARALAKQVATALQNLQTKTNRAVANSRPAKAAVHLEGKIEQARRWIDNPTVDDRGVGQAAIRGLVAEGHRLANVMMGPYRQDLLAKCDRVDQLTAQLADLAARGEGESPQARALASQLQDSLKDLKAQMQEAMTQEVSDVFSDTTTPIKLLAVAATAPPDAPNREEVFDERAANFENHSGRLGATAEKAAAVGTANKSTVEGIQASVKTARELTPQVISAARILLRNPGNQAAYEHFETMKNQWIDNVEKMTGLVDEAIDTKSLLDASEEAIKKDLDKCKVAMANIQPQMLVAGATSIARRANRILLVAKREVENSEDPKFREAVKAASDELSKTISPMVMDAKAVAGNISDPDLQKSFLDSGYRILGAVAKVREAFQPQEPDFPPPPPDLEQLRLTDELAPPKPPLPEGEVPPPRPPPPEEKDEEFPEQKAGEVINQPMMMAARQLHDEARKWSSKGNDIIAAAKRMALLMAEMSRLVRGGSGTKRALIQCAKDIAKASDEVTRLAKEVAKQCTDKRIRTNLLQVCERIPTISTQLKILSTVKATMLGRTNISDEESEQATEMLVHNAQNLMQSVKETVREAEAASIKIRTDAGFTLRWVRKTPWYQ

SEQ ID NO: 48 - DNA, 807 bp, Mus musculus
gggcacgactccagcctcttcgaggacagaagcgaccatgacaaacacaaggacagaaaacggaaaaagaggaagaaaggcgagaagcaggctcccggggaagagaaggggagaaaacggagaagagtcaaggaggataaaaagaagcgggatcgagaccgtgcagagaatgaggtggacagagatctccagtgtcatgtccctataagattagacttacctcctgagaagcctcttacaagctcgttagccaaacaagaagaagtagaacagacaccccttcaggaagctttgaatcagctcatgagacaattgcaaagtaccatgaaagaaaagatcaagaataacgactaccagtccatagaagaactaaaggataacttcaagctaatgtgtactaatgcaatgatttacaataagccagagaccatttattataaagctgcaaagaagctgttgcactcagggatgaaaattctcagtcaggagagaattcagagcctgaagcagagtatagacttcatgtcagacttgcagaaaactcggaagcagaaagaacgaacagatgcctgtcagagtggggaggacagcggctgctggcagcgcgagagggaagactctggagatgctgaaacacaggccttcagaagccccgctaaggacaataaaaggaaagacagagatgtgcttgaagacaaatggagaagcagcaactcagaaagggagcatgagcagattgagcgcgttgtccaggagtcaggaggcaagctaacacggcggctggcaaacagtcagtgtgaatttgaa

SEQ ID NO: 49 - DNA, 348 bp, Mus musculus
gccatcgtggagcgcagagccaacctgctgcgggctgagattgaggagctgcgggccacgctggagcagacggagaggagcaggaagattgcagagcaggagctgctggacgccagtgagcgcgtgcagctcctccacacccagaacacgagcctcatcaacaccaagaagaagctggaaaatgatgtttcacagctgcagagtgaagtggaagaagtgattcaagagtcacgcaatgcagaagagaaggctaagaaagccattactgatgccgccatgatggcggaggagctgaagaaggagcaggacaccagcgcccacctggagcggatgaagaagaacatggag

SEQ ID NO: 50 - DNA, 1281 bp, Mus musculus
gaaaaacaagagctgaaacaagagattatgaatgagacttttgaatatggttctctgtttttgggctctgcttcaaaaacaacgaccacctcaggtaggaatatatccaagcctgactcctgcggtttgaggcaaatagctgctccaaaagccaaagtggggccccctgtttcctgtttgaggcggaacagtgacaatagaaatcccagtgctgatcgagccgtatctcctcagaggatcaggcgtgtgtccagttctgctggtaatgccgctgtcatcaagtatgaggagaaacctccaaaaccagcatttcagaatggttcctcaggatccttttatttgaagcctttggtatccagggctcatgttcacttgatgaaaactcctccaaaaggtccttcgagaaaaaatttatttacagctcttaatgcagttgaaaagagcaagcaaaagaatcctcgaagcttatgtatccagccacagacagctcccgatgcgctgccccctgaaaaaacacttgaattgacgccatataaaacaaaatgtgaaaaccaaagtggatttatcctgcagctcaagcagcttcttgcctgtggtaataccaagtttgaggcattgacagttgtgattcagcacctgctgtctgagcgggaggaagcactgaaacaacacaaaaccctatctcaagaacttgttaacctccggggagagctagtcactgcttcaaccacccgtgagaaattagaaaaagccaggaatgagttacaaacagtgtatgaagcattcgtccagcagcaccaggctgaaaaaacagaacgagagaatcggcttaaagagttttacaccagggagtatgaaaagcttcgggacacttacattgaagaagcagagaagtacaaaatgcaattgcaagagcagtttggcaacttaaatgctgcgcatgaaacctttaagttggaaattgaagctagccactcagagaaacttgaattgctaaagaaggcctatgaagcctccctttcagaaattaagaaaggccatgaaatagaaaagaaatcgcttgaagatttactttctgagaagcaggaatcgctagagaagcaaatcaatgatctgaagagtgaaaatgatgctttaaatgaaaaattgaaatcagaagaacaaaaaagaagagcaagagaaaaagcaaatttgaaaaatcctcagatcatgtatctagaacaggagttagaaagcctgaaagctgtgttagagatcaagaatgagaaactgcatcaacag

SEQ ID NO: 51 - protein, 250 aa, Homo sapiens
TGAPPWANLVSILEEKNGADPELLVYTVTLINKTLAALPDQDSFYDVTDALEQQGMDTLVQRHLGTAGTDVDLRTQLVLYENALKLEDGDIEEAPGAGGRRERRKPSSEEGKRSRRSLEGGGCPARAPEPGPTGPASPVGPTSSTGPALLTGPASSPVGPPSGLQASVNLFPTISVAPSADTSSERSIYKARFLENVAAAETEKQVALAQGRAETLAGAMPNEAGGHPDARQLWDSPETAPAARTPQSPA

SEQ ID NO: 52 - protein, 250 aa, Homo sapiens
PCVLLRAQRSLAPEPKEPLIPASPKAEPIWELPTRAPRLSIGDLDFSDLGEDEDQDMLNVESVEAGKDIPAPSPPLPLLSGVPPPPPLPPPPPIKGPFPPPPPLPLAAPLPHSVPDSSALPTKRKTVKLFWRDVKLAGGHGVSASRFGPCATLWASLDPVSVDTARLEHLFESRAKEVLPSKKAGEGRRTMTTVLDPKRTNAINIGLTTLPPVHVIKAALLNFDEFAVSKDGIEKLLTMMPTEEERQKIE

SEQ ID NO: 53 - protein, 159 aa, Homo sapiens
TLWASLDPVSVDTARLEHLFESRAKEVLPSKKAGEGRRTMTTVLDPKRTNAINIGLTTLPPVHVIKAALLNFDEFAVSKDGIEKLLTMMPTEEERQKIEGAQLANPDIPLGPAENFLMTLASIGGLAARLQLWAFKLDYDSMEREIAEPLFDLKVGMEQ

SEQ ID NO: 54 - protein, 115 aa, Homo sapiens
ELSYLEKVSDVKDTVRRQSLLHHLCSLVLQTRPESSDLYSEIPALTRCAKVDFEQLTENLGQLERRSRAAEESLRSLAKHELAPALRARLTHFLDQCARRVAMLRIVHRRVCNRF

SEQ ID NO: 55 - protein, 378 aa, Mus musculus
DRKQHLDKTWADAEDLNSQNEAELRRQVEERQQETEHVYELLGNKIQLLQEEPRLAKNEATEMETLVEAEKRCNLELSERWTNAAKNREDAAGDQEKPDQYSEALAQRDRRIEELRQSLAAQEGLVEQLSQEKQQLLHLLEEPASMEVQPVPKGLPTQQKPDLHETPTTQPPVSESHLAELQDKIQQTEATNKILQEKLNDLSCELKSAQESSQKQDTTIQSLKEMLKSRESETEELYQVIEGQNDTMAKLREMLHQSQLGQLHSSEGIAPAQQQVALLDLQSALFCSQLEIQRLQRLVRQKERQLADGKRCVQLVEAAAQEREHQKEAAWKHNQELRKALQHLQGELHSKSQQLHVLEAEKYNEIRTQGQNIQHLSH

SEQ ID NO: 56 - protein, 316 aa, Mus musculus
EPRLAKNEATEMETLVEAEKRCNLELSERWTNAAKNREDAAGDQEKPDQYSEALAQRDRRIEELRQSLAAQEGLVEQLSQEKRQLLHLLEEPASMEVQPVPKGLPTQQKPDLHETPTTQPPVSESHLAELQDKIQQTEATNKILQEKLNDLSCELKSAQESSQKRDTTIQSLKEMLKSRESETEELYQVVEGQNDTMAKLREMLHQSQLGQLHSSEGIAPAQQQVALLDLQSALFCSQLEIQRLQRLVRQKERQLADGKRCVQLVEAAAQEREHQKEAAWKHNQELRKALQHLQGELHSKSQQLHVLEAEKYNETR

SEQ ID NO: 57 - protein, 162 aa, Mus musculus
AAVLGEADDGNLDLDMKSGLENTAALDNQPKGALKKLIYAAKLNASLKALEGERNQVYTQLSEVDQVKEDLTEHIKSLESKQASLQSEKTEFESESQKLQQKLKVITELYQENEMKLHRKLTVEENYRLEKEEKLSKVDEKISHATEELETCRQRAKDLEEE

SEQ ID NO: 58 - protein, 281 aa, Mus musculus
KQTKVEGELEEMERKHQQLLEEKNILAEQLQAETELFAEAEEMRARLAAKKQELEEILHDLESRVEEEEERNQILQNEKKKMQAHIQDLEEQLDEEEGARQKLQLEKVTAEAKIKKMEEEVLLLEDQNSKFIKEKKLMEDRIAECSSQLAEEEEKAKNLAKIRNKQEVMISDLEERLKKEEKTRQELEKAKRKLDGETTDLQDQIAELQAQVDELKVQLTKKEEELQGALARGDDETLHKNNALKVARELQAQIAELQEDIESEKASRNKAEKQKRDLSEE

SEQ ID NO: 59 - protein, 339 aa, Mus musculus
ELTKVREKYLAAENRLTEMETMQSQLMAEKLQLQEQLQAETELCAEAEELRARLTAKEQELEEICHDLEARVEEEEERCQYLQAEKKKMQQNIQELEEQLEEEESARQKLQLEKVTTEAKLKKLEEDQIIMEDQNCKLAKEKKLLEDRVAEFTTNLMEEEEKSKSLAKLKNKHEAMITDLEERLRREEKQRQELEKTRRKLEGDSTDLSDQIAELQAQIAELKMQLAKKEEESQAALARVEEEAAQKNMALKKIRELETQISELQEDLESERASRNKAEKQKRDLGEELEALKTELEDTLDSTAAQQELRSKREQEVSILKKTLEDEAKTHEAQIQGMR

SEQ ID NO: 60 - protein, 82 aa, Mus musculus
IYTELSIAKAKADCDISRLKEQLKAATEALGEKSPEGTTVSGYDIMKSKSNPDFLKKDRSCVTRRLRNIRSKSVIEQVSWDN

SEQ ID NO: 61 - protein, 87 aa, Homo sapiens
KNVTNNLKSLEAQAEKYSQKEDKYEEEIKILTDKLKEAETRAEFAERSVAKLEKTIDDLEDELYAQKLEYKAISEELDHALNDMTSI

SEQ ID NO: 62 - protein, 238 aa, Homo sapiens
EEKMVSLLQEKNDLQLQVQAEQDNLNDAEERCDQLIKNKIQLEAKVKEMNERLEDEEEMNAELTAKKRKLEDECSELKKDIDDLELTLAKVEKEKHATENKVKNLTEEMAGLDEIIAKLTKEKKALQEAHQQALDDLQVEEDKVNSLSKSKVKLEQQVDDLEGSLEQEKKVRMDLERAKRKLEGDLKLTQESIMDLENDKLQLEEKLKKKEFDINQQNSKIEDEQALALQLQKKLKKN

SEQ ID NO: 63 - protein, 169 aa, Mus musculus
APAAGEEGPASLGQAGAAGCSRSRPPALEPERSLGRLRGRFEDYDEELEEEEEMEEEEEEEEEMSHFSLRLESGRADSEDEEERLINLVELTPYILCSICKGYLIDATTITECLHTFCKSCIVRHFYYSNRCPKCNIVVHQTQPLYNIRLDRQLQDIVYKLVINLEERE

SEQ ID NO: 64 - protein, 298 aa, Homo sapiens
IKITELNPHLMCALCGGYFIDATTIVECLHSFCKTCIVRYLETNKYCPMCDVQVHKTRPLLSIRSDKTLQDIVYKLVPGLFKDEMKRRRDFYAAYPLTEVPNGSNEDRGEVLEQEKGALGDDEIVSLSIEFYEGVRDREEKKNLTENGDGDKEKTGVRFLRCPAAMTVMHLAKFLRNKMDVPSKYKVEILYEDEPLREYYTLMDIAYIYPWRRNGPLPLKYRVQPACKRLTLPTVPTPSEGTNTSGASECESVSDKAPSPATLPATSSSLPSPATPSHGSPSSHGPPATHPTSPTPPS

SEQ ID NO: 65 - protein, 294 aa, Homo sapiens
MHRTTRIKITELNPHLMCALCGGYFIDATTIVECLHSFCKTCIVRYLETNKYCPMCDVQVHKTRPLLSIRSDKTLQDIVYKLVPGLFKDEMKRRRDFYAAYPLTEVPNGSNEDRGEVLEQEKGALSDDEIVSLSIEFYEGAGDRDEKKGPLENGDGDKEKTGVRFLRCPAAMTVMHLAKFLRNKMDVPSKYKVEVLYEDEPLKEYYTLMDIAYIYPWRRNGPLPLKYRVQPACKRLTLATVPTPSEGTNTSGASESSGATTAANGGSLNCLQTPSSTSRGRKMTVNGAPVPPLT

SEQ ID NO: 66 - protein, 212 aa, Homo sapiens
LLSVAYKNVIGARRASWRIISSIEQKEENKGGEDKLKMIREYRQMVETELKLICCDILDVLDKHLIPAANTGESKVFYYKMKGDYHRYLAEFATGNDRKEAAENSLVAYKAASDIAMTELPPTHPIRLGLALNFSVFYYEILNSPDRACRLAKAAFDDAIAELDTLSEESYKDSTLIMQLLRDNLTLWTSDMQGDGEEQNKEALQDVEDENQ

SEQ ID NO: 67 - protein, 161 aa, Homo sapiens
VETELKLICCDILDVLDKHLIPAANTGESKVFYYKMKGDYHRYLAEFATGNDRKEAAENSLVAYKAASDIAMTELPPTHPIRLGLALNFSVFYYEILNSPDRACRLAKAAFDDAIAKLDTLSEESYKDSTLIMQLLRDNLTLWTSDMQGDGEEQNKEALQD

SEQ ID NO: 68 - protein, 155 aa, Homo sapiens
EYRQMVETELKLICCDILDVLDKHLIPAANTGESKVFYYKMKGDYHRYLAEFATGNDRKEAAENSLVAYKAASDIAMTELPPTHPIRLGLALNFSVFYYEILNSPDRACRLAKAAFDDAIAELDTLSEESYKDSTLIMQLLRDNLTLWTSDMQGD

SEQ ID NO: 69 - protein, 87 aa, Homo sapiens
REASHPLCTGPAQAGLAHRCLLAALMGKRLGTGDCLWPTQLLGQWPVTLVCLRPLCPLMFLVLELELLPGTLQLHPPCLIPPGRPGH

SEQ ID NO: 70 - protein, 261 aa, Mus musculus
QSYLDSGIHSGATTTAPSLSGKGNPEEEDVDTSQVLYEWEQGFSQSFTQEQVADIDGQYAMTRAQRVRAAMFPETLDEGMQIPSTQFDAAHPTNVQRLAEPSQMLKHAVVNLINYQDDAELATRAIPELTKLLNDEDQVVVNKAAVMVHQLSKKEASRHAIMRSPQMVSAIVRTMQNTNDVETARCTAGTLHNLSHHREGLLAIFKSGGIPALVKMLGSPVDSVLFYAITTLHNLLLHQEGAKMAVRLAGGLQKMVALLNK

SEQ ID NO: 71 - protein, 168 aa, Mus musculus
KALSAIAELLTSEHERVVKAASGALRNLAVDARNKELIGKHAIPNLVKNLPGGQLNSSWNFSEDTVVSILNTINEVIAENLEAAKKLRETQGIEKLVLINKSGNRSEKEVRAAALVLQTIWGYKELRKPLEKEGWKKSDFQVNINNASRSQSSHSYDDSTLPLIDRNQ

SEQ ID NO: 72 - protein, 162 aa, Mus musculus
MAVVIRLQGLPIVAGTMDIRHFFSGLTIPDGGVHIVGGELGEAFIVFATDEDARLGMMRTGGTIKGSKVTLLLSSKTEMQNMIELSRRRFETANLDIPPANASRSGPPPSSGMSSRVNLPATVPNSNNPSPSVVTATTSVHESNKNIQTFSTASVGTAPPSM

SEQ ID NO: 73 - protein, 144 aa, Mus musculus
MAVVIRLQGLPIVAGTMDIRHFFSGLTIPDGGVHIVGGELGEAFIVFATDEDARLGMMRTGGTIKGSKVTLLLSSKTEMQNMIELSRRRFETANLDIPPANASRSGPPPSSGMSSRVNLPATVPNFNNPSPSVVTATTSVHESN

SEQ ID NO: 74 - protein, 188 aa, Mus musculus
KEGRREHAFVPEPFTGTNLAPSLWLHRFEVIDDLNHWDHATKLRFLKESLKGDALDVYNGLSSQAQGDFSFVKQALLRAFGAPGEAFSEPEEVLFANSMGKGYYLKGKVGHVPVRFLVDSGAQVSVVHPALWEEVTDGDLDTLRPFNNVVKVANGAEMKILGVWDTEISLGKTKLKAEFLVANASAEE

SEQ ID NO: 75 - protein, 261 aa, Mus musculus
SPYSPRGGSNVIQCYRCGDTCKGEVVRVHNNHFHIRCFTCQVCGCGLAQSGFFFKNQEYICAQDYQQLYGTRCDSCRDFITGEVISALGRTYRPKCFVCSLCRKPFPIGDKVTFSGKECVCQTCSQSMTSSKPIKIRGPSHCAGCKEEIKHGQSLLALDKQWHVSCFKCQTCSVILTGEYISKDGVPYCESDYHSQFGIKCETCDRYISGRVLEAGGKHYHPTCARCVRCHQMFTEGEEMYLTGSEVWHPICKQAARAEKK

SEQ ID NO: 76 - protein, 193 aa, Homo sapiens
ESKDEVPGSRLHLGSARRAAGSDADHLREQQRELEAMRQRLLSAARLLTSFTSQAVDRTVNDWTSSNEKAVMSLLHTLEELKSDLSRPTSSQKKMAAELQFQFVDVLLKDNVSLTKALSTVTQEKLELSRAVSKLEKLLKHHLQKGCSPGRSERSAWKPDETAPQSSLRRPDPGRLPPAASEEAHTSNAKMDK

SEQ ID NO: 77 - protein, 232 aa, Homo sapiens
IDDLIKSGILPILVHCLERDDNPSLQFEAAWALTNIASGTSEQTQAVVQSNAVPLFLRLLHSPHQNVCEQAVWALGNIIGDGPQCRDYVISLGVVEPLLSFISPSIPITFLRNVTWVMVNLCRHKDPPPPMETIQEILPALCVLIHHTDVNILVDTVWALSYLTDAGNEQIQMVIDSGIVPHLVPLLSHQEVKVQTAALRAVGIIVTGTDEQTQVVLNCDALSHFPALLTHP

SEQ ID NO: 78 - protein, 125 aa, Homo sapiens
HRLRFTTDVQLGISGDKVEIDPVTNQKASTKFWIKQKPISIDSDLLCACDLAEEKSPSHAIFKLTYLSNHDYKHLYFESDAATVNEIVLKVNYILESRASTARADYFAQKQRKLNRRTSFSFQKE

SEQ ID NO: 79 - protein, 157 aa, Mus musculus
DIYKIREIADGLCLEVEGKMVSRTEGAIDDSLIGGNASAEGPEGEGTESTVVTGVDIVMNHHLQETSFTKEAYKKYIKDYMKSLKGKLEEQKPERVKPFMTGAAEQIKHILANFNNYQFFIGENMNPDGMVALLDYREDGVTPFMIFFKDGLEMEKC

SEQ ID NO: 80 - protein, 200 aa, Mus musculus
MKHNLELTMAEMRQSLEQERDRLIAEVKKQLELEKQQAVDETKKRQWCANCKKEAIFYCCWNTSYCDYPCQQAHWPEHMKSCTQSATAPQQEADAEASTETGNKSSQGNSSNTQSAPSEPASAPKEKEAPAEKSKDSSNSTLDLSGSRETPSSMLLGSNQSSVSKRCDKQPAYTPTTTDRQPHPNYPAQKYHSRSSKAGL

SEQ ID NO: 81 - protein, 187 aa, Mus musculus
EEDPVDYGCEMQLLQDGAQLQLQLQPEEFVAIADYTATDETQLSFLRGEKILILRQTTADWWWGERAGCCGYIPANHLGKQLEEYDPEDTWQDEEYFDSYGTLKLHLGMLADQPRTTKYHSVILQNKESLKDKVILDVGCGTGIISLFCAHHARPKAVYAVEASDMAQHTSQLVLQNGFADTITVFQ

SEQ ID NO: 82 - protein, 240 aa, Homo sapiens
ATSGDCPRSESQGEEPAECSEAGLLQEGVQPEEFVAIADYAATDETQLSFLRGEKILILRQTTADWWWGERAGCCGYIPANYVGKHVDEYDPEDTWQDEEYFGSYGTLKLHLEMLADQPRTTKYHSVILQNKESLTDKVILDVGCGTGIISLFCAHYARPRAVYAVEASEMAQHTGQLVLQNGFADIITVYQQKVEDVVLPEKVDVLVSEWMGTCLLKQQSSEGDASKDTTGVLDCQQTI

SEQ ID NO: 83 - protein, 186 aa, Homo sapiens
RRGRSRETNEEPPPPTVQVQGPGPQREEKQKTKMAKFVIRPATAADCSDILRLIKELAKYEYMEEQVILTEKDLLEDGFGEHPFYHCLVAEVPKEHWTPEGHSIVGFAMYYFTYDPWIGKLLYLEDFFVMSDYRGFGIGSEILKNLSQVAMRCRCSSMHFLVAEWNEPSINFYKRRGASDLSSEEG

SEQ ID NO: 84 - protein, 294 aa, Homo sapiens
FCELSSPAEMANVLCNRARLVSYLPGFCSLVKRVVNPKAFSTAGSSGSDESHVAAAPPDICSRTVWPDETMGPFGPQDQRFQLPGNIGFDCHLNGTASQKKSLVHKTLPDVLAEPLSSERHEFVMAQYVNEFQGNDAPVEQEINSAETYFERARVECAIQTCPELLRKDFESLFPEVANGKLMILTVTQKTKNDMTVWSEEVEIEREVLLEKFINGAKEICYALRAEGYWADFIDPSSGLAFFGPYTNNTLFETDERYRHLGFSVDDLGCCKVIRHSLWGTHVVVGSIFTNATP

SEQ ID NO: 85 - protein, 228 aa, Homo sapiens
GPFGPQDQRFQLPGNIGFDCHLNGTASQKKSLVHKTLPDVLAEPLSSERHEFVMAQYVNEFQGNDAPVEQEINSAETYFESARVECAIQTCPELLRKDFESLFPEVANGKLMILTVTQKTKNDMTVWSEEVEIEREVLLEKFINGAKEICYALRAEGYWADFIDPSSGLAFFGPYTNNTLFETDERYRHLGFSVDDLGCCKVIRHSLWGTHVVVGSIFTNATPDSHIM

SEQ ID NO: 86 - protein, 161 aa, Homo sapiens
LTIQKARVTEKAVTSPPRVKSPEPRVKSPEAVKSPKRVKSPEPSHPKAVSPTETKPTPTEKVQHLPVSAPPEITQFLKAEASKEIAKLTCVVESSVLRAKEVTWYKDGEKLKENGHFQFHYSADGTYELKINNLTESDQGEYVCEISGEGGTSKANLQFMG

SEQ ID NO: 87 - protein, 908 aa, Mus musculus
TRPIIARAQCPGLGTMKRTDSGSICHHAPPPCWAHHAPRQSPRQPSSRERRPPERAGSWAVAAEEEEAASAAPWMRHYFGEDDGEMVPRTSSAAAFLSDTKDRGPPVQSQTWRSAERVPFGQAHSLRAFEKPPLVQTQALRDFEKHLNDLKKENFSLKLRIYFLEERMQQKYEVSREDVYKRNIELKVEVESLKRELQDRKQHLDKTWADAEDLNSQNEAELRRQVEERQQETEHVYELLGNKIQLLQEEPRLAKNEATEMETLVEAEKRCNLELSERWTNAAKNREDAAGDQEKPDQYSEALAQRDRRIEELRQSLAAQEGLVEQLSQEKRQLLHLLEEPASMEVQPVPKGLPTQQKPDLHETPTTQPPVSESHLAELQDKIQQTEATNKILQEKLNDLSCELKSAQESSQKQDTTIQSLKEMLKSRESETEELYQVIEGQNDTMAKLREMLHQSQLGQLHSSEGIAPAQQQVALLDLQSALFCSQLEIQRLQRLVRQKERQLADGKRCVQLVEAAAQEREHQKEAAWKHNQELRKALQHLQGELHSKSQQLHVLEAEKYNEIRTQGQNIQHLSHSLSHKEQLIQELQELLQYRDNADKTLDTNEVFLEKLRQRIQDRAVALERVIDEKFSALEEKDKELRQLRLAVRDRDHDLERLRCVLSANEATMQSMESLLRARGLEVEQLTATCQNLQWLKEELETKFGHWQKEQESIIQQLQTSLHDRNKEVEDLSATLLCKLGPGQSEVAEELCQRLQRKERMLQDLLSDRNKQAVEHEMEIQGLLQSMGTREQERQAAAEKMVQAFMERNSELQALRQYLGGKELMTSSQTFISNQPAGVTSIGPHHGEQTDQGSMQMPSRDDSTSLTAREEASIPRSTLGDSDTVAGLEKELSNAKEELELMAKKKKK

SEQ ID NO: 88 - protein, 777 aa, Mus musculus
MRADFNPSGFSLELAVCVLSVGLLAVVLFLWRGFRSIRSRFYVGREKKLALELSALIEEKCKLLDKVSIVQKEYEGLESSLKEASFEKESTEAQSLEFVEGSQISEATYENLEQSKSKLEDEILLLEEKLEEERAKHSEQDELMADISKRIQSLEDESKSLKSQVAEAKTTFRIFEINEERLKGAIKDALNENSQLQESQKQLLQETEMMKEQVNDLDKQKVALEESRAQAEQALSEKESQIETLVTSLLKMKDWAAVLGEADDGNLDLDMKSGLENTAALDNQPKGALKKLIYAAKLNASLKALEGERNQVYTQLSEVDQVKEDLTEHIKSLESKQASLQSEKTEFESESQKLQQKLKVITELYQENEMKLHRKLTVEENYRLEKEEKLSKVDEKISHATEELETCRQRAKDLEEELERTIHSYQGQVISHEKKAHDNWLAARTLERNLNDLRKENAHNRQKLTETEFKFELLEKDPYALDVPNTAFGREHSPYGPSPLGRPPSETRAFLSPPTLLEGPLRLSPLLPGGGGRGSRGPENLLDHQMNTERGESSYDRLSDAPRAPSDRSLSPPWEQDRRMTAHPPPGQPYSDPALQRQDRFYPNSGRLSGPAELRSYNMPSLDKVDGPVPSEMESSGNGTKDNLGNSNVPDSPIPAECEAAGRGFFPPPFPPVRDPLFPVDPRSQFMRRGPSFPPPPPGSIYAAPRDYFPPRDFPGPPLPPFPGRTVYAPRGFPPYLPPRAGFFPPPPHPESRSELPPDLIPPSKEPAADPPETQEA

SEQ ID NO: 89 - protein, 1236 aa, Mus musculus
MDGKQACERMIRALELDPNLYRIGQSKIFFRAGVLAHLEEERDLKITDIIIFFQAVCRGYLARKAFAKKQQQLSALKVLQRNCAAYLKLRHWQWWRVFTKVKPLLQVTRQEEELQAKDEELLKVKEKQTKVEGELEEMERKHQQLLEEKNILAEQLQAETELFAEAEEMRARLAAKKQELEEILHDLESRVEEEEERNQILQNEKKKMQAHIQDLEEQLDEEEGARQKLQLEKVTAEAKIKKMEEEVLLLEDQNSKFIKEKKLMEDRIAECSSQLAEEEEKAKNLAKIRNKQEVMISDLEERLKKEEKTRQELEKAKRKLDGETTDLQDQIAELQAQVDELKVQLTKKEEELQGALARGDDETLHKNNALKVARELQAQIAELQEDFESEKASRNKAEKQKRDLSEELEALKTELEDTLDTTAAQQELRTKREQEVAELKKALEDETKNHEAQIQDMRQRHATALEELSEQLEQAKRFKANLEKNKQGLETDNKELACEVKVLQQVKAESEHKRKKLDAQVQELHAKVSEGDRLRVELAEKANKLQNELDNVSTLLEEAEKKGIKFAKDAAGLESQLQDTQELLQEETRQKLNLSSRIRQLEEEKNSLQEQQEEEEEARKNLEKQVLALQSQLADTKKKVDDDLGTIESLEEAKKKLLKDVEALSQRLEEKVLAYDKLEKTKNRLQQELDDLTVDLDHQRQIVSNLEKKQKKFDQLLAEEKGISARYAEERDRAEAEAREKETKALSLARALEEALEAKEEFERQNKQLRADMEDLMSSKDDVGKNVHELEKSKRALEQQVEEMRTQLEELEDELQATEDAKLRLEVNMQAMKAQFERDLQTRDEQNEEKKRLLLKQVRELEAELEDERKQRALAVASKKKMEIDLKDLEAQIEAANKARDEVIKQLRKLQAQMKDYQRELEEARASRDEIFAQSKESEKKLKSLEAEILQLQEELASSERARRHAEQERDELADEIANSASGKSALLDEKRRLEARIAQLEEELEEEQSNMELLNDRFRKTTLQVDTLNTELAAERSAAQKSDNARQQLERQNKELKAKLQELEGAVKSKFKATISALEAKIGQLEEQLEQEAKERAAANKLVRRTEKKLKEIFMQVEDERRHADQYKEQMEKANARMKQLKRQLEEAEEEATRANASRRKLQRELDDATEANEGLSREVSTLKNRLRRGGPISFSSSRSGRRQLHIEGASLELSDDDTESKTSDVNDTQPPQSE

SEQ ID NO: 90 - protein, 1960 aa, Mus musculus
MAQQAADKYLYVDKNFINNPLAQADWAAKKLVWVPSSKNGFEPASLKEEVGEEAIVELVENGKKVKVNKDDIQKMNPPKFSKVEDMAELTCLNEASVLHNLKERYYSGLIYTYSGLFCVVINPYKNLPIYSEEIVEMYKGKKRHEMPPHIYAITDTAYRSMMQDREDQSILCTGESGAGKTENTKKVIQYLAHVASSHKSKKDQGELERQLLQANPILEAFGNAKTVKNDNSSRFGKFIRINFDVNGYIVGANIETYLLEKSRAIRQAKEERTFHIFYYLLSGAGEHLKTDLLLEPYNKYRFLSNGHVTIPGQQDKDMFQETMEAMRIMGIPEDEQMGLLRVISGVLQLGNIAFKKERNTDQASMPDNTAAQKVSHLLGINVTDFTRGILTPRIKVGRDYVQKAQTKEQADFAIEALAKATYERMFRWLVLRINKALDKTKRQGASFIGILDIAGFEIFDLNSFEQLCINYTNEKLQQLFNHTMFILEQEEYQREGIEWNFIDFGLDLQPCIDLIEKPAGPPGILALLDEECWFPKATDKSFVEKVVQEQGTHPKFQKPKQLKDKADFCIIHYAGKVDYKADEWLMKNMDPLNDNIATLLHQSSDKFVSELWKDVDRIIGLDQVAGMSETALPGAFKTRKGMFRTVGQLYKEQLAKLMATLRNTNPNFVRCIIPNHEKKAGKLDPHLVLDQLRCNGVLEGIRICRQGFPNRVVFQEFRQRYEILTPNSIPKGFMDGKQACVLMIKALELDSNLYRIGQSKVFFRAGVLAHLEEERDLKITDVIIGFQACCRGYLARKAFAKRQQQLTAMKVLQRNCAAYLRLRNWQWWRLFTKVKPLLNSIRHEDELLAKEAELTKVREKHLAAENRLTEMETMQSQLMAEKLQLQEQLQAETELCAEAEELRARLTAKKQELEEICHDLEARVEEEEERCQYLQAEKKKMQQNIQELEEQLEEEESARQKLQLEKVTTEAKLKKLEEDQIIMEDQNCKLAKEKKLLEDRVAEFTTNLMEEEEKSKSLAKLKNKHEAMITDLEERLRREEKQRQELEKTRRKLEGDSTDLSDQIAELQAQIAELKMQLAKKEEELQAALARVEEEAAQKNMALKKIRELETQISELQEDLESERASRNKAEKQKRDLGEELEALKTELEDTLDSTAAQQELRSKREQEVSILKKTLEDEAKTHEAQIQEMRQKHSQAVEELADQLEQTKRVKATLEKAKQTLENERGELANEVKALLQGKGDSEHKRKKVEAQLQELQVKFSEGERVRTELADKVTKLQVELDSVTGLLSQSDSKSSKLTKDFSALESQLQDTQELLQEENRQKLSLSTKLKQMEDEKNSFREQLEEEEEAKRNLEKQIATLHAQVTDMKKKMEDGVGCLETAEEAKRRLQKDLEGLSQRLEEKVAAYDKLEKTKTRLQQELDDLLVDLDHQRQSVSNLEKKQKKFDQLLAEEKTISAKYAEERDRAEAEAREKETKALSLARALEEAMEQKAELERLNKQFRTEMEDLMSSKDDVGKSVHELEKSKRALEQQVEEMKTQLEELEDELQATEDAKLRLEVNLQAMKAQFERDLQGRDEQSEEKKKQLVRQVREMEAELEDERKQRSMAMAARKKLEMDLKDLEAHIDTANKNREEAIKQLRKLQAQMKDCMRELDDTRASREEILAQAKENEKKLKSMEAEMIQLQEELAAAERAKRQAQQERDELADEIANSSGKGALALEEKRRLEARIALLEEELEEEQGNTELINDRLKKANLQIDQINTDLNLERSHAQKNENARQQLERQNKELKAKLQEMESAVKSKYKASIAALEAKIAQLEEQLDNETKERQAASKQVRRTEKKLKDVLLQVEDERRNAEQFKDQADKASTRLKQLKRQLEEAEEEAQRANASRRKLQRELEDATETADAMNREVSSLKNKLRRGDLPFVVTRRIVRKGTGDCSDEEVDGKADGADAKAAE

SEQ ID NO: 91 - protein, 1024 aa, Mus musculus
MSAAKENPCRKFQANIFNKSKCQNCFKPRESHLLNDEDLTQAKPIYGGWLLLAPDGTDFDNPVHRSRKWQRRFFILYEHGLLRYALDEMPTTLPQGTINMNQCTDVVDGEARTGQKFSLCILTPDKEHFIRAETKEIISGWLEMLMVYPRTNKQNQKKKRKVEPPTPQEPGPAKMAVTSSSGGTSGSSSSIPSAEKVPTTKSTLWQEEMRAKDQPDGTSLSPAQSPSQSQPPAACTPREPGLESKEDESTISGDRVDGGRKVRVESGYFSLEKAKQDLRAEEQLPPLLSPPSPSTPHSRRSQVIEKFEALDIEKAEHMETNMLILTTPSSDTRQGRSERRAIPRKRDFASEAPTAPLSDACPLSPHRRAKSLDRRSTESSMTPDLLNFKKGWLTKQYEDGQWKKHWFVLADQSLRYYRDSVAEEAADLDGEINLSTCYDVTEYPVQRNYGFQIHTKEGEFTLSAMTSGIRRNWIQTIMKHVLPASAPDVTSSLPEGKNKSTSFETCSRSTEKQEAEPGEPDPEQKKSRARERRREGRSKTFDWAEFRPIQQALAQERASAVGSSDSGDPGCLEAEPGELERERARRREEPRKRFGMLDTIDGPGMEDTALRMDIDRSPGLLGTPDLKTQNVHVEIEQRWHQVETTPLREEKQVPIAPLHLSLEDRSERLSTHELTSLLEKELEQSQKEASDLLEQNRLLQDQLRVALGREQSAREGYVLQATCERGFAAMEETHQKKIEDLQRQHQRELEKLREEKDRLLAEETAATISAIEAMKNAHREEMERELEKSQRSQISSINSDIEALRRQYLEELQSVQRELEVLSEQYSQKCLENAHLAQALEAERQALRQCQRENQELNAHNQELNNRLAAEITRLRTLLTGDGGGESTGLPLTQGKDAYELEVLLRVKESEIQYLKQEISSLKDELQTALRDKKYASDKYKDIYTELSIAKAKADCDISRLKEQLKAATEALGEKSPEGTTVSGYDIMKSKSNPDFLKKDRSCVTRQLRNIRSKSVIEQVSWDN

SEQ ID NO: 92 - protein, 243 aa, Homo sapiens
MMEAIKKKMQMLKLDKENALDRAEQAEAEQKQAEERSKQLEDELAAMQKKLKGTEDELDRAQERLATALQKLEEAEKAADESERGMKVIENRALKDEEKMELQEIQLKEAKHIAEEADRKYEEVARKLVIIEGDLERTEERAELAESKCSELEEELKNVTNNLKSLEAQAEKYSQKEDKYEEEIKILTDKLKEAETRAEFAERSVAKLEKTIDDLEDELYAQKLKYKAISEELDHALNDMTSI

SEQ ID NO: 93 - protein, 1939 aa, Homo sapiens
MTDAQMADFGAAAQYLRKSEKERLEAQTRPFDIRTECFVPDDKEEFVKAKILSREGGKVIAETENGKTVTVKEDQVLQQNPPKFDKIEDMAMLTFLHEPAVLFNLKERYAAWMIYTYSGLFCVTVNPYKWLPVYNAEVVAAYRGKKRSEAPPHIFSISDNAYQYMLTDRENQSILITGESGAGKTVNTKRVIQYFASIAAIGDRGKKDNANANKGTLEDQIIQANPALEAFGNAKTVRNDNSSRFGKFIRIHFGATGKLASADIETYLLEKSRVIFQLKAERNYHIFYQILSNKKPELLDMLLVTNNPYDYAFVSQGEVSVASIDDSEELMATDSAFDVLGFTSEEKAGVYKLTGAIMHYGNMKFKQKQREEQAEPDGTEDADKSAYLMGLNSADLLKGLCHPRVKVGNEYVTKGQSVQQVYYSIGALAKAVYEKMFNWMVTRINATLETKQPRQYFIGVLDIAGFEIFDFNSFEQLCINFTNEKLQQFFNHHMFVLEQEEYKKEGIEWTFIDFGMDLQACIDLIEKPMGIMSILEEECMFPKATDMTFKAKLYDNHLGKSNNFQKPRNIKGKQEAHFSLIHYAGTVDYNILGWLEKNKDPLNETVVALYQKSSLKLMATLFSSYATADTGDSGKSKGGKKKGSSFQTVSALHRENLNKLMTNLRTTHPHFVRCIIPNERKAPGVMDNPLVMHQLRCNGVLEGIRICRKGFPNRILYGDFRQRYRILNPVAIPEGQFIDSRKGTEKLLSSLDIDHNQYKFGHTKVFFKAGLLGLLEEMRDERLSRIITRMQAQARGQLMRIEFKKIVERRDALLVIQWNIRAFMGVKNWPWMKLYFKIKPLLKSAETEKEMATMKEEFGRIKETLEKSEARRKELEEKMVSLLQEKNDLQLQVQAEQDNLNDAEERCDQLIKNKIQLEAKVKEMNERLEDEEEMNAELTAKKRKLEDECSELKKDIDDLELTLAKVEKEKHATENKVKNLTEEMAGLDEIIAKLTKEKKALQEAHQQALDDLQVEEDKVNSLSKSKVKLEQQVDDLEGSLEQEKKVRMDLERAKRKLEGDLKLTQESIMDLENDKLQLEEKLKKKEFDINQQNSKIEDEQVLALQLQKKLKENQARIEELEEELEAERTARAKVEKLRSDLSRELEEISERLEEAGGATSVQIEMNKKREAEFQKMRRDLEEATLQHEATAAALRKKHADSVAELGEQIDNLQRVKQKLEKEKSEFKLELDDVTSNMEQIIKAKANLEKVSRTLEDQANEYRVKLEEAQRSLNDFTTQRAKLQTENGELARQLEEKEALISQLTRGKLSYTQQMEDLKRQLEEEGKAKNALAHALQSARHDCDLLREQYEEETEAKAELQRVLSKANSEVAQWRTKYETDAIQRTEELEEAKKKLAQRLQDAEEAVEAVNAKCSSLEKTKHRLQNEIEDLMVDVERSNAAAAALDKKQRNFDKILAEWKQKYEESQSELESSQKEARSLSTELFKLKNAYEESLEHLETFKRENKNLQEEISDLTEQLGEGGKNVHELEKVRKQLEVEKLELQSALEEAEASLEHEEGKILRAQLEFNQIKAEIERKLAEKDEEMEQAKRNHQRVVDSLQTSLDAETRSRNEVLRVKKKMEGDLNEMEIQLSHANRMAAEAQKQVKSLQSLLKDTQIQLDDAVRANDDLKENIAIVERRNNLLQAELEELRAVVEQTERSRKLAEQELIETSERVQLLHSQNTSLINQKKKMESDLTQLQSEVEEAVQECRNAEEKAKKAITDAAMMAEELKKEQDTSAHLERMKKNMEQTIKDLQHRLDEAEQIALKGGKKQLQKLEARVRELEGELEAEQKRNAESVKGMRKSERRIKELTYQTEEDKKNLLRLQDLVDKLQLKVKAYKRQAEEAEEQANTNLSKFRKVQHELDEAEERADIAESQVNKLRAKSRDIGAKQKMHDEE

SEQ ID NO: 94 - protein, 353 aa, Mus musculus
MDEAETDATENKRASEAKRASAMPPPPPPPPPISPPALIPAPAAGEEGPASLGQAGAAGCSRSRPPALEPERSLGRLRGRFEDYDEELEEEEEMEEEEEEEEEMSHFSLRLESGRADSEDEEERLINLVELTPYILCSICKGYLIDATTITECLHTFCKSCIVRHFYYSNRCPKCNIVVHQTQPLYNIRLDRQLQDIVYKLVINLEEREKKQMHDFYKERGLEVPKPAAPQPVPSSKGKTKKVLESVFRIPPELDMSLLLEFIGANEDTGHFKPLEKKFVRVSGEATIGHVEKFLRRKMGLDPACQVDIICGDHLLERYQTLREIRRAIGDTAMQDGLLVLHYGLVVSPLKIT

SEQ ID NO: 95 - protein, 342 aa, Mus musculus
MHRTTRIKITELNPHLMCALCGGYFIDATTIVECLHSFCKTCIVRYLETNKYCPMCDVQVHKTRPLLSIRSDKTLQDIVYKLVPGLFKDEMKRRRDFYAAYPLTEVPNGSNEDRGEVLEQEKGALGDDEIVSLSIEFYEGVRDREEKKNLTENGDGDKEKTGVRFLRCPAAMTVMHLAKFLRNKMDVPSKYKVEILYEDEPLKEYYTLMDIAYIYPWRRNGPLPLKYRVQPACKRLTLPTVPTPSEGTNTSGASECESVSDKAPSPATLPATSSSLPSPATPSHGSPSSHGPPATHPTSPTPPSTAAGTTTATNGGTSNCLQTPSSTSRGRKMTVNGAPCPP

SEQ ID NO: 96 - protein, 255 aa, Homo sapiens
MDDREDLVYQAKLAEQAERYDEMVESMKKVAGMDVELTVEERNLLSVAYKNVIGARRASWRIISSIEQKEENKGGEDKLKMIREYRQMVETELKLICCDILDVLDKHLIPAANTGESKVFYYKMKGDYHRYLAEFATGNDRKEAAENSLVAYKAASDIAMTELPPTHPIRLGLALNFSVFYYEILNSPDRACRLAKAAFDDAIAELDTLSEESYKDSTLIMQLLRDNLTLWTSDMQGDGEEQNKEALQDVEDENQ

SEQ ID NO: 97 - protein, 781 aa, Mus musculus
MATQADLMELDMAMEPDRKAAVSHWQQQSYLDSGIHSGATTTAPSLSGKGNPEEEDVDTSQVLYEWEQGFSQSFTQEQVADIDGQYAMTRAQRVRAAMFPETLDEGMQIPSTQFDAAHPTNVQRLAEPSQMLKHAVVNLINYQDDAELATRAIPELTKLLNDEDQVVVNKAAVMVHQLSKKEASRHAIMRSPQMVSAIVRTMQNTNDVETARCTAGTLHNLSHHREGLLAIFKSGGIPALVKMLGSPVDSVLFYAITTLHNLLLHQEGAKMAVRLAGGLQKMVALLNKTNVKFLAITTDCLQILAYGNQESKLIILASGGPQALVNIMRTYTYEKLLWTTSRVLKVLSVCSSNKPAIVEAGGMQALGLHLTDPSQRLVQNCLWTLRNLSDAATKQEGMEGLLGTLVQLLGSDDINVVTCAAGILSNLTCNNYKNKMMVCQVGGIEALVRTVLRAGDREDITEPAICALRHLTSRHQEAEMAQNAVRLHYGLPVVVKLLHPPSHWPLIKATVGLIRNLALCPANHAPLREQGAIPRLVQLLVRAHQDTQRRTSMGGTQQQFVEGVRMEEIVEGCTGALHILARDVHNRIVIRGLNTIPLFVQLLYSPIENIQRVAAGVLCELAQDKEAAEAIEAEGATAPLTELLHSRNEGVATYAAAVLFRMSEDKPQDYKKRLSVELTSSLFRTEPMAWNETADLGLDIGAQGEALGYRQDDPSYRSFHSGGYGQDALGMDPMMEHEMGGHHPGADYPVDGLPDLGHAQDLMDGLPPGDSNQLAWFDTDL

SEQ ID NO: 98 - protein, 911 aa, Mus musculus
MDDSEVESTASILASVKEQEAQFEKLTRALEEERRHVSAQLERVRVSPQDANSLMANGTLTRRHQNGRFVGDADLERQKFSDLKLNGPQDHNHLLYSTIPRMQEPGQIVETYTEEDPEGAMSVVSVETTDDGTTRRTETTVKKVVKTMTTRTVQPVPMGPDGLPVDASAVSNNYIQTLGRDFRKNGNGGPGPYVGQAGTATLPRNFHYPPDGYGRHYEDGYPGGSDNYGSLSRVTRIEERYRPSMEGYRAPSRQDVYGPQPQVRVGGSSVDLHRFHPEPYGLEDDQRSMGYDDLDYGMMSDYGTARRTGTPSDPRRRLRSYEDMIGEEVPPDQYYWAPLAQHERGSLASLDSLRKGMPPPSNWRQPELPEVIAMLGFRLDAVKSNAAAYLQHLCYRNDKVKTDVAKLKGIPILVGLLDHPKKEVHLGACGALKNISFGRDQDNKIAIKNCDGVPALVRLLRKARDMDLTEVITGTLWNLSSHDSIKMEIVDHALHALTDEVIIPHSGWEREPNEDCKPRHIEWESVLTNTAGCLRNVSSERSEARRKLRECDGLVDALIFIVQAEIGQKDSDSKLVENCVCLLRNLSYQVHREIPQAERYQEALPTVANSTGPHAASCFGAKKGKGKKPTEDPANDTVDFPKRTSPARGYELLFQPEVVRIYISLLKESNTPAILEASAGAIQNLCAGRWTYGRYIRSALRQEKALSARAELLTSEHERVVKAASGALRNLAVDARNKELIGKHARPNLVKNLPGGQQNSSWNFSEDTVVSILNTINEVIAENLEAAKKLRETQGIEKLVLINKSGNRSEKEVRAAALVLQTIWGYKELRKPLEKEGWKKSDFQVNLNNASRSQSSHSYDDSTLPLIDRNQKSDNNYSTLNERGDHNRTLDRSGDLGDMEPLKGAPLMQKI

SEQ ID NO: 99 - protein, 1003 aa, Mus musculus
MAVVIRLQGLPIVAGTMDIRHFFSGLTIPDGGVHIVGGELGEAFIVFATDEDARLGMMRTGGTIKGSKVTLLLSSKTEMQNMIELSRRRFETANLDIPPANASRSGPPPSSGMSSRVNLPATVPNFNNPSPSVVTATTSVHESNKNIQTFSTASVGTAPPSMGTSFGSPTFSSTIPSTASPMNTVPPPPIPPIPAMPSLPPLPSIPPIPVPPPVPTLPPVPPVPPIPPVPSVPPMTTLPPMSGMPPLNPPPVAPLPAGMNGSGAPIGLNNNMNPVFLGPLNPVNSIQMNSQSSVKSLPINPDDLYVSVHGMPFSAMENDVREFFHGLRVDAVHLLKDHVGRNNGNGLVKFLSPQDTFEALKRNRMLMIQRYVEVSPATERQWVAAGGHITFKQSMGPSGQAHPPPQTLPRSKSPSGQKRSRSRSPHEAGFCVYLKGLPFEAENKHVIDFFKKLDIVEDSIYIAYGPNGKATGEGFVEFRNDADYKAALCRHKQYMGNRFIQVHPITKKGMLEKIDMIRKRLQNFSYDQRELVLNPEGEVSSAKVCAHITNIPFSITKMDVLQFLEGIPVDENAVHVLVDNNGQGLGQALVQFKTEDDAHKSEHLHRKKLNGREAFVHIVTLEDMREIEKNPPAQGKKGLKISVPGNPAVPVIPSAGMPAAGIPTAGIPGAGLPSAGMPGAGMPSSGMPGPGMPGPGIPGAGIPGPAMPGPAMPGPAMPGPAMPGPAMPGPAMPGPAMPGPAMPGPAIPGPAIPGPAIPGPAIPGPTIPGAGIPSAGGEEHVFLTVGSKEANNGPPFNFPGNFGGPNAFGPPLPPPGLGGGGAFGDARPGMPSVGNSGLPGLGLDVPGFGGGNNISGPSGFGGIPQNFGNGPGSLNAPPGFGSGPPGLGSVPGHLSGPPAFGPGPGPGLIHIGGPPGFGASSGKPGPTIIKVQNMPFTVSIDEILDFFYGYQVIPGSVCLKYNEKGMPTGEAMVAFESRDEATAAVIDLNDRPIGSRKVKLVLG

SEQ ID NO: 100 - protein, 248 aa, Mus musculus
KEGRREHAFVPEPFTGTNLAPSLWLHRFEVIDDLNHWDHATKLRFLKESLKGDALDVYNGLSSQAQGDFSFVKQALLRAFGAPGEAFSEPEEVLFANSMGKGYYLKGKVGHVPVRFLVDSGAQVSVVHPALWEEVTDGDLDTLRPFNNVVKVANGAEMKILGVWDTEISLGKTKLKAEFLVANASAEEAIIGTDVLQDHNAVLDFEHRTCTLKGKKFRLLPVGSSLEDEFDLELIEEEEGSSAPEGSH

SEQ ID NO: 101 - protein, 3336 aa, Homo sapiens
MEVEQEQRRRKVEAGRTKLAHFRQRKTKGDSSHSEKKTAKRKGSAVDASVQEESPVTKEDSALCGGGDICKSTSCDDTPDGAGGAFAAQPEDCDGEKREDLEQLQQKQVNDHPPEQCGMFTVSDHPPEQHGMFTVGDHPPEQRGMFTVSDHPPEQHGMFTVSDHPPEQRGMFTISDHQPEQRGMFTVSDHTPEQRGIFTISDHPAEQRGMFTKECEQECELAITDLESGREDEAGLHQSQAVHGLELEALRLSLSNMHTAQLELTQANLQKEKETALTELREMLNSRRAQELALLQSRQQHELELLREQHAREKEEVVLRCGQEAAELKEKLQSEMEKNAQIVKTLKEDWESEKDLCLENLRKELSAKHQSEMEDLQNQFQKELAEQRAELEKIFQDKNQAERALRNLESHHQAAIEKLREDLQSEHGRCLEDLEFKFKESEKEKQLELENLQASYEDLKAQSQEEIRRLWSQLDSARTSRQELSELHEQLLARTSRVEDLEQLKQREKTQHESELEQLRIYFEKKLRDAEKTYQEDLTLLQQRLQGAREDALLDSVEVGLSCVGLEEKPEKGRKDHVDELEPERHKESLPRFQAELEESHRHQLEALESPLCIQHEGHVSDRCCVETSALGHEWRLEPSEGHSQELPWVHLQGVQDGDLEADTERAARVLGLETEHKVQLSLLQTELKEEIELLKIENRNLYGKLQHETRLKDDLEKVKHNLIEDHQKELNNAKQKTELMKQEFQRKETDWKVMKEELQREAEEKLTLMLLELREKAESEKQTIINKFELREAEMRQLQDQQAAQILDLERSLTEQQGRLQQLEQDLTSDDALHCSQCGREPPTAQDGELAALHVKEDCALQLMLARSRFLEERKEITEKFSAEQDAFLQEAQEQHARELQLLQERHQQQLLSVTAELEARHQAALGELTASLESKQGALLAARVAELQTKHAADLGALETRHLSSLDSLESCYLSEFQTIREEHRQALELLRADFEEQLWKKDSLHQTILTQELEKLKRKHEGELQSVRDHLRTEVSTELAGTVAHELQGVHQGEFGSEKKTALHEKEETLRLQSAQAQPFHQEEKESLSLQLQKKNHQVQQLKDQVLSLSHEIEECRSELEVLQQRRERENREGANLLSMLKADVNLSHSERGALQDALRRLLGLFGETLRAAVTLRSRIGERVGLCLDDAGAGLALSTALALEEMWSDVALPELDRTLSECAEMSSVAEISSHMCESFLMSPESVRECEQPIRRVFQSLSLAVDGLMEMALDSSSQLEEARQIHSRFEKEFSFKNEETAQVVRKHQELLECLKEESAAKAELALELHKTQGTLEGFKVETADLKEVLAGKEDSEHRLVLELESLRRQLQQAAQEQAALREECTRLWSRGEATATDAEAREAALRKEVEDLTKEQSETRKQAEKDRSALLSQMKILESELEEQLSQHRGCAKQAEAVTALEQQVASLDKHLRNQRQFMDEQAAEREHEREEFQQEIQRLEGQLRQAAKPQPWGPRDSQQAPLDGEVELLQQKLREKLDEFNELAIQKESADRQVLMQEEEIKRLEEMNINIRKKVAQLQEEVEKQKNIVKGLEQDKEVLKKQQMSSLLLASTLQSTLDAGRCPEPPSGSPPEGPEIQLEVTQRALLRRESEVLDLKEQLEKMKGDLESKNEEILHLNLKLDMQNSQTAVSLRELEEENTSLKVIYTRSSEIEELKATIENLQENQKRLQKEKAEEIEQLHEVIEKLQHELSLMGPVVHEVSDSQAGSLQSELLCSQAGGPRGQALQGELEAALEAKEALSRLLADQERRHSQALEALQQRLQGAEEAAELQLAELERNVALREAEVEDMASRIQEFEAALKAKEATIAERNLEIDALNQRKAAHSAELEAVLLALARIRRALEQQPLAAGAAPPELQWLRAQCARLSRQLQVLHQRFLRCQVELDRRQARRATAHTRVPGAHPQPRMDGGAKAQVTGDVEASHDAALEPVVPDPQGDLQPVLVTLKDAPLCKQEGVMSVLTVCQRQLQSELLLVKNEMRLSLEDGGKGKEKVLEDCQLPKVDLVAQVKQLQEKLNRLLYSMTFQNVDAADTKSLWPMASAHLLESSWSDDSCDGEEPDISPHIDTCDANTATGGVTDVIKNQAIDACDANTTPGGVTDVIKNWDSLIPDEMPDSPIQEKSECQDRSLSSPTSVLGGSRHQSHTAEAGPRKSPVGMLDLSSWSSPEVLRKDWTLEPWPSLPVTPHSGALSLCSADTSLGDRADTSLPQTQGPGLLCSPGVSAAALALQWAESPPADDHHVQRTAVEKDVEDFITTSFDSQETLSSPPPGLEGKADRSEKSDGSGFGARLSPGSGGPEAQTAGPVTPASISGRFQPLPEAMKEKEVRPKHVKALLQMVRDESHQILALSEGLAPPSGEPHPPRKEDEIQDISLHGGKTQEVPTACPDWRGDLLQVVQEAFEKEQEMQGVELQPRLSGSDLGGHSSLLERLEKIIREQGDLQEKSLEHLRLPDRSSLLSEIQALRAQLRMTHLQNQEKLQHLRTALTSAEARGSQQEHQLRRQVELLAYKVEQEKCIAGDLQKTLSEEQEKANSVQKLLAAEQTVVRDLKSDLCESRQKSEQLSRSLCEVQQEVLQLRSMLSSKENELKAALQELESEQGKGRALQSQLEEEQLRHLQRESQSAKALEELRASLETQRAQSSRLCVALKHEQTAKDNLQKELRIEHSRCEALLAQERSQLSELQKDLAAEKSRTLELSEALRHERLLTEQLSQRTQEACVHQDTQAHHALLQKLKEEKSRVVDLQAMLEKVQQQALHSQQQLEAEAQKHCEALRREKEVSATLKSTVEALHTQKRELRCSLEREREKPAWLQAELEQSHPRLKEQEGRKAARRSAEARQSPAAAEQWRKWQRDKEKLRELELQRQRDLHKIKQLQQTVRDLESKDEVPGSRLHLGSARRAAGSDADHLREQQRELEAMRQRLLSAARLLTSFTSQAVDRTVNDWTSSNEKAVMSLLHTLEELKSDLSRPTSSQKKMAAELQFQFVDVLLKDNVSLTKALSTVTQEKLELSRAVSKLEKLLKHHLQKGCSPSRSERSAWKPDETAPQSSLRRPDPGRLPPAASEEAHTSNVKMEKLYLHYLRAESFRKALIYQKKYLLLLIGGFQDSEQETLSMIAHLGVFPSKAERKITSRPFTRFRTAVRVVIAILRLRFLVKKWQEVDRKGALAQGKAPRPGPRARQPQSPPRTRESPPTRDVPSGHTRDPARGRRLAAAASPHSGGRATPSPNSRLERSLTASQDPEHSLTEYIHHLEVIQQRLGGVLPDSTSKKSCHPMIKQ

SEQ ID NO: 102 - protein, 521 aa, Homo sapiens
MADNEKLDNQRLKNFKNKGRDLETMRRQRNEVVVELRKNKRDEHLLKRRNVPHEDICEDSDIDGDYRVQNTSLEAIVQNASSDNQGIQLSAVQAARKLLSSDRNPPIDDLIKSGILPILVHCLERDDNPSLQFEAAWALTNIASGTSEQTQAVVQSNAVPLFLRLLHSPHQNVCEQAVWALGNIIGDGPQCRDYVISLGVVKPLLSFISPSIPITFLRNVTWVMVNLCRHKDPPPPMETIQEILPALCVLIHHTDVNILVDTVWALSYLTDAGNEQIQMVIDSGIVPHLVPLLSHQEVKVQTAALRAVGNIVTGTDEQTQVVLNCDALSHFPALLTHPKEKINKEAVWFLSNITAGNQQQVQAVIDANLVPMIIHLLDKGDFGTQKEAAWAISNLTISGRKDQVAYLIQQNVIPPFCNLLTVKDAQVVQVVLDGLSNILKMAEDEAETIGNLIEECGGLEKIEQLQNHENEDIYKLAYEIIDQFFSSDDIDEDPSLVPEAIQGGTFGFNSSANVPTEGFQF

SEQ ID NO: 103 - protein, 486 aa, Homo sapiens
MAFLDNPTIILAHIRQSHVTSDDTGMCEMVLIDHDVDLEKIHPPSMPGDSGSEIQGSNGETQGYVYAQSVDITSSWDFGIRRRSNTAQRLERLRKERQNQIKCKNIQWKERNSKQSAQELKSLFEKKSLKEKPPISGKQSILSVRLEQCPLQLNNPFNEYSKFDGKGHVGTTATKKIDVYLPLHSSQDRLLPMTVVTMASARVQDLIGLICWQYTSEGREPKLNDNVSAYCLHIAEDDGEVDTDFPPLDSNEPIHKFGFSTLALVEKYSSPGLTSKESLFVRINAAHGFSLIQVDNTKVTMKEILLKAVKRRKGSQKVSGSRADGVFEEDSQIDIATVQDMLSSHHYKSFKVSMIHRLRFTTDVQLGISGDKVEIDPVTNQKASTKFWIKQKPISIDSDLLCACDLAEEKSPSHAIFKLTYLSNHDYKHLYFESDAATVNEIVLKVNYILESRASTARADYFAQKQRKLNRRTSFSFQKEKKSGQQ

SEQ ID NO: 104 - protein, 172 aa, Mus musculus
MIIYRDLISHDELFSDIYKIREIADGLCLEVEGKMVSRTEGAIDDSLIGGNASAEGPEGEGTESTVVTGVDIVMNHHLQETSFTKEAYKKYIKDYMKSLKGKLEEQKPERVKPFMTGAAEQIKHILANFNNYQFFIGENMNPDGMVALLDYREDGVTPFMIFFKDGLEMEKC

SEQ ID NO: 105 - protein, 679 aa, Mus musculus
  misc_feature (51)..(51): Xaa can be any naturally occurring amino acid
QSRSRFQLNLDKTIESCKAQLGINEISEDVYTAVEHSDSEDSEKSESSDRXYVSDEEQKPKNEPEDPEDKEGSRVDKEAPAIKRKPKPTNQVEVKEEAKSNSPVSEKPDPTPAKDKASPEPEKDFVEKAKPSPHPTKDKLKGKDETDSPTVHLGLDSDSESELVIDLGEDPSGREGRKNKKDPKVPSPKQDAIGKPPPSSTSAGNQSPPETPVLTRSATQAPAAGVTVAAATTSTMSTVTVTAPATAVTGSPVKKQRPLLPKETVPAVQRVVWNASSKFQTSSQKWHMQKIQRQQQQQQQQQQSQQQSQQQQPQSSQGTRYQTRQAVKAVQQKEVTQSPSTSTITLVTSTQPAALVSSSGSASTLASAINADLPIATASADVAADIAKYTSKMMDAIKGTMTEIYNDLSKNTTGSTIAEIRRLRIEIEKLQWLHQQELAEMKHNLELTMAEMRQSLEQERDRLIAEVKKQLELEKQQAVDETKKKQWCANCKKEAIFYCCWNTSYCDYPCQQAHWPEHMKSCTQSATAPQQEADAEASTETGNKSSQGNSSNTQSAPSEPASAPKEKEAPAEKSKDSSNSTLDLSGSRETPSSMLLGSNQSSVSKRCDKQPAYTPTTTDHQPHPNYPAQKYHSRSSKAGLWSSSEEKRASSRSEHSGGTSTKNLMPKESRESRLDAFWD

SEQ ID NO: 106 - protein, 448 aa, Mus musculus
MEAPGEGPCSESQVIPVLEEDPVDYGCEMQLLQDGAQLQLQLQPEEFVAIADYTATDETQLSFLRGEKILILRQTTADWWWGERAGCCGYIPANHLGKQLEEYDPEDTWQDEEYFDSYGTLKLHLEMLADQPRTTKYHSVILQNKESLKDKVILDVGCGTGIISLFCAHHARPKAVYAVEASDMAQHTSQLVLQNGFADTITVFQQKVEDVVLPEKVDVLVSEWMGTCLLFEFMIESILYARDTWLKGDGIIWPTTAALHLVPCSAEKDYHSKVLFWDNAYEFNLSALKSLAIKEFFSRPKSNHILKPEDCLSEPCTILQLDMRTVQVPDLETMRGELRFDIQKAGTLHGFTAWFSVYFQSLEEGQPQQVVSTGPLHPTTHWKQTLFMMDDPVPVHTGDVVHGFCCVTKKSGMEKAHVCLSELGCHVRTRSHVSTELETGSFRSGGDS

SEQ ID NO: 107 - protein, 241 aa, Homo sapiens
MATSGDCPRSESQGEEPAECSEAGLLQEGVQPEEFVAIADYAATDETQLSFLRGEKILILRQTTADWWWGERAGCCGYIPANHVGKHVDEYDPEDTWQDEEYFGSYGTLKLHLEMLADQPRTTKYHSVILQNKESLTDKVILDVGCGTGIISLFCAHYARPRAVYAVEASEMAQHTGQLVLQNGFADIITVYQQKVEDVVLPEKVDVLVSEWMGTCLLKQQSSEGDASKDTTGVLDCQQTI

SEQ ID NO: 108 - protein, 204 aa, Homo sapiens
RRGRSRETNEEPPPPTVQVQGPGPQREEKQKTKMAKFVIRPATAADCSDILRLIKELAKYEYMEEQVILTEKDLLEDGFGEHPFYHCLVAEVPKEHWTPEGHSIVGFAMYYFTYDPWIGKLLYLEDFFVMSDYRGFGIGSEILKNLSQVAMRCRCSSMHFLVAEWNEPSINFYKRRGASDLSSEEGWRLFKIDKEYLLKMATEE

SEQ ID NO: 109 - protein, 305 aa, Homo sapiens
FCELSSPAEMANVLCNRARLVSYLPGFCSLVKRVVNPKAFSTAGSSGSDESHVAAAPPDICSRTVWPDETMGPFGPQDQRFQLPGNIGFDCHLNGTASQKKSLVHKTLPDVLAEPLSSERHEFVMAQYVNEFQGNDAPVEQEINSAETYFESARVECAIQTCPELLRKDFESLFPEVANGKLMILTVTQKTKNDMTVWSEEVEIEREVLLEKFINGAKEICYALRAEGYWADFIDPSSGLAFFGPYTNNTLFETDERYRHLGFSVDDLGCCKVIRHSLWGTHVVVGSIFTNATPDSHIMKKLSGN

SEQ ID NO: 110 - protein, 27118 aa, Homo sapiens
MTTQAPTFTQPLQSVVVLEGSTATFEAHISGFPVPEVSWFRDGQVISTSTLPGVQISFSDGRAKLTIPAVTKANSGRYSLKATNGSGQATSTAELLVKAETAPPNFVQRLQSMTVRQGSQVRLQVRVTGIPTPVVKFYRDGAEIQSSLDFQISQEGDLYSLLIAEAYPEDSGTYSVNATNSVGRATSTAELLVQGEEEVPAKKTKTIVSTAQISESRQTRIEKKIEAHFDARSIATVEMVIDGAAGQQLPHKTPPRIPPKPKSRSPTPPSIAAKAQLARQQSPSPIRHSPSPVRHVRAPTPSPVRSVSPAARISTSPIRSVRSPLLMRKTQASTVATGPEVPPPWKQEGYVASSSEAEMRETTLTTSTQIRTEERWEGRYGVQEQVTISGAAGAAASVSASASYAAEAVATGAKEVKQDADKSAAVATVVAAVDMARVREPVISAVEQTAQRTTTTAVHIQPAQEQVRKEAEKTAVTKVVVAADKAKEQELKSRTKEVITTKQEQMHVTHEQIRKETEKTFVPKVVISAAKAKEQETRISEEITKKQKQVTQEAIMKETRKTVVPKVIVATPKVKEQDLVSRGREGITTKREQVQITQEKMRKEAEKTALSTIAVATAKAKEQETILRTRETMATRQEQIQVTHGKVDVGKKAEAVATVVAAVDQARVREPREPGHLEESYAQQTTLEYGYKERISAAKVAEPPQRPASEPHVVPKAVKPRVIQAPSETHIKTTDQKGMHISSQIKKTTDLTTERLVHVDKRPRTASPHFTVSKISVPKTEHGYEASIAGSAIATLQKELSATSSAQKITKSVKAPTVKPSETRVRAEPTPLPQFPFADTPDTYKSEAGVEVKKEVGVSITGTTVREERFEVLHGREAKVTETARVPAPVEIPVTPPTLVSGLKNVTVIEGESVTLECHISGYPSPTVTWYREDYQIESSIDFQITFQSGIARLMIREAFAEDSGRFTCSAVNEAGTVSTSCYLAVQVSEEFEKETTAVTEKFTTEEKRFVESRDVVMTDTSLTEEQAGPGEPAAPYFITKPVVQKLVEGGSVVFGCQVGGNPKPHVYWKKSGVPLTTGYRYKVSYNKQTGECKLVISMTFADDAGEYTIVVRNKHGETSASASLLEEADYELLMKSQQEMLYQTQVTAFVQEPKVGETAPGFVYSEYEKEYEKEQALIRKKMAKDTVVVRTYVEDQEFHISSFEERLIKEIEYRIIKTTLEELLEEDGEEKMAVDISESEAVESGFDLRIKNYRILEGMGVTFHCKMSGYPLPKIAWYKDGKRIKHGERYQMDFLQDGRASLRIPVVLPEDEGIYTAFASNIKGNAICSGKLYVEPAAPLGAPTYIPTLEPVSRIRSLSPRSVSRSPIRMSPARMSPARMSPARMSPARMSPGRRLEETDESQLERLYKPVFVLKPVSFKCLEGQTARFDLKVVGRPMPETFWFHDGQQIVNDYTHKVVIKEDGTQSLIIVPATPSDSGEWTVVAQNRAGRSSISVILTVEAVEHQVKPMFVEKLKNVNIKEGSRLEMKVRATGNPNPDIVWLKNSDIIVPHKYPKIRIEGTKGEAALKIDSTVSQDSAWYTATAINKAGRDTTRCKVNVEVEFAEPEPERKLIIPRGTYRAKEIAAPELEPLHLRYGQEQWEEGDLYDKEKQQKPFFKKKLTSLRLKRFGPAHFECRLTPIGDPTMVVEWLHDGKPLEAANRLRMINEFGYCSLDYGVAYSRDSGIITCRATNKYGTDHTSATLIVKDEKSLVEESQLPEGRKGLQRIEELERMAHEGALTGVTTDQKEKQKPDIVLYPEPVRVLEGETARFRCRVTGYPQPKVNWYLNGQLIRKSKRFRVRYDGIHYLDIVDCKSYDTGEVKVTAENPEGVIEHKVKLEIQQREDFRSVLRRAPEPRPEFHVHEPGKLQFEVQKVDRPVDTTETKEVVKLKRAERITHEKVPEESEELRSKFKRRTEEGYYEAITAVELKSRKKDESYEELLRKTKDELLHWTKELTEEEKKALAEEGKITIPTFKPDKIELSPSMEAPKIFERIQSQTVGQGSDAHFRVRVVGKPDPECEWYKNGVKIERSDRIYWYWPEDNVCELVIRDVTAEDSASIMVKAINIAGETSSHAFLLVQAKQLITFTQELQDVVAKEKDTMATFECETSEPFVKVKWYKDGMEVHEGDKYRMHSDRKVHFLSILTIDTSDAEDYSCVLVEDENVKTTAKLIVEGAVVEFVKELQDIEVPESYSGELECIVSPENIEGKWYHNDVELKSNGKYTITSRRGRQNLTVKDVTKEDQGEYSFVIDGKKTTCKLKMKPRPIAILQGLSDQKVCEGDIVQLEVKVSLESVEGVWMKDGQEVQPSDRVHIVIDKQSHMLLIEDMTKEDAGNYSFTIPALGLSTSGRVSVYSVDVITPLKDVNVIEGTKAVLECKVSVPDVTSVKWYLNDEQIKPDDRVQAIVKGTKQRLVINRTHASDEGPYKLIVGRVETNCNLSVEKIKIIRGLRDLTCTETQNVVFEVELSHSGIDVLWNFKDKEIKPSSKYKIEAHGKIYKLTVLNMMKDDEGKYTFYAGENITSGKLTVAGGAISKPLTDQTVAESQEAVFECEVANPDSKGEWLRDGKHLPLTNNIRSESDGHKRRLIIAATKLDDIGEYTYKVATSKTSAKLKVEAVKIKKTLKNLTVTETQDAVFTVELTHPNVKGVQWIKNGVVLESNEKYAISVKGTIYSLRIKNCAIVDESVYGFRLGRLGASARLHVETVKIIKKPKDVTALENATVAFEVSVSHDTVPVKWFHKSVEIKPSDKHRLVSERKVHKLMLQNISPSDAGEYTAVVGQLECKAKLFVETLHITKTMKNIEVPETKTASFECEVSHFNVPSMWLKNGVEIEMSEKFKIVVQGKLHQLIIMNTSTEDSAEYTFVCGNDQVSATLTVTPIMITSMLKDINAEEKDTITFEVTVNYEGISYKWLKNGVEIKSTDKCQMRTKKLTHSLNIRNVHFGDAADYTFVAGKATSTATLYVEARHIEFRKHIKDIKVLEKKRAMFECEVSEPDITVQWMKDDQELQITDRIKIQKEKYVHRLLIPSTRMSDAGKYTVVAGGNVSTAKLFVEGRDVRIRSIKKEVQVIEKQRAVVEFEVNEDDVDAHWYKDGIEINFQVQERHKYVVERRIHRMFISETRQSDAGEYTFVAGRNRSSVTLYVNAPEPPQVLQELQPVTVQSGKPARFCAVISGRPQPKISWYKEEQLLSTGFKCKFLHDGQEYTLLLIEAFPEDAAVYTCEAKNDYGVATTSASLSVEVPEVVSPDQEMPVYPPAIITPLQDTVTSEGQPARFQCRVSGTDLKVSWYSKDKKIKPSRFFRMTQFEDTYQLEIAEAYPEDEGTYTFVASNAVGQVSSTANLSLEVQALDRQSSGKDVRESTKSQAVADSSFTKEESKISQKEIKSFQGSSYEYEVQVFESVSQSSIHTAASVQDTQLCHTASLSQIAESTELSKECAKESTGEAPKIFLHLQDVTVKCGDTAQFLCVLKDDSFIDVTWTHEGAKIEESERLKQSQNGNIQFLTICNVQLVDQGLYSCIVHNDCGERTTSAVLSVEGAPESILHERIEQEIEMEMKEFSSSFLSAEEEGLHSAELQLSKINETLELLSESPVYSTKFDSEKEGTGPIFIKEVSNADISMGDVATLSVTVIGIPKPKIQWFFNGVLLTPSADYKFVFDGDDHSLIILFTKLEDEGEYTCMASNDYGKTICSAYLKINSKGEGHKDTETESAVAKSLEKLGGPCPPHFLKELKPIRCAQGLPAIFEYTVVGEPAPTVTWFKENKQLCTSVYYTIIHNPNGSGTFIVNDPQREDSGLYICKAENMLGESTCAAELLVLLEDTDMTDTPCKAKSTPEAPEDFPQTPLKGPAVEALDSEQEIATFVKDTILKAALITEENQQLSYEHIAKANELSSQLPLGAQELQSILEQDKLTPESTREFLCINGSIHFQPLKEPSPNLQLQIVQSQKTFSKEGILMPEEPETQAVLSDTEKIFPSAMSIEQINSLTVEPLKTLLAEPEGNYPQSSIEPPMHSYLTSVAEEVLSPKEKTVSDTNREQRVTLQKQEAQSALILSQSLAEGHVESLQSPDVMISQVNYEPLVPSEHSCTEGGKILIESANPLENAGQDSAVRIEEGKSLRFPLALEEKQVLLKEEHSDNVVMPPDQIIESKREPVAIKKVQEVQGRDLLSKESLLSGIPEEQRLNLKIQICRALQAAVASEQPGLFSEWLRNIEKVEVEAVNITQEPRHIMCMYLVTSAKSVTEEVTIIIEDVDPQMANLKMELRDALCAIIYEEIDILTAEGPRIQQGAKTSLQEEMDSFSGSQKVEPITEPEVESKYLISTEEVSYFNVQSRVKYLDATPVTKGVASAVVSDEKQDESLKPSEEKEESSSESGTEEVATVKIQEAEGGLIKEDGPMIHTPLVDTVSEEGDIVHLTTSITNAKEVNWYFENKLVPSDEKFKCLQDQNTYTLVIDKVNTEDHQGEYVCEALNDSGKTATSAKLTVVKRAAPVIKRKIEPLEVALGHLAKFTCEIQSAPNVRFQWFKAGREIYESDKCSIRSSKYISSLEILRTQVVDCGEYTCKASNEYGSVSCTATLTVTVPGGEKKVRKLLPERKPEPKEEVVLKSVLRKRPEEEEPKVEPKKLEKVKKPAVPEPPPPKPVEEVEVPTVTKRERKIPEPTKVPEIKPAIPLPAPEPKPKPEAEVKTIKPPPVEPEPTPIAAPVTVPVVGKKAEAKAPKEEAAKPKGPIKGVPKKTPSPIEAERRKLRPGSGGEKPPDEAPFTYQLKAVPLKFVKEIKDIILTESEFVGSSAIFECLVSPSTAITTWMKDGSNIRESPKHRFIADGKDRKLHIIDVQLSDAGEYTCVLRLGNKEKTSTAKLVVEELPVRFVKTLEEEVTVVKGQPLYLSCELNKERDVVWRKDGKIVVEKPGRIVPGVIGLMRALTINDADDTDAGTYTVTVENANNLECSSCVKVVEVIRDWLVKPIRDQHVKPKGTAIFACDIAKDTPNIKWFKGYDEIPAEPNDKTEILRDGNHLYLKIKNAMPEDIAEYAVEIEGKRYPAKLTLGEREVELLKPIEDVTIYEKESASFDAEISEADIPGQWKLKGELLRPSPTCEIKAEGGKRFLTLHKVKLDQAGEVLYQALNAITTAILTVKEIELDFAVPLKDVTVPERRQARFECVLTREANVIWSKGPDIIKSSDKFDIIADGKKHILVINDSQFDDEGVYTAEVEGKKTSARLFVTGIRLKFMSPLEDQTVKEGETATFVCELSHEKMHVVWFKNDAKLHTSRTVLISSEGKTHKLEMKEVTLDDISQIKAQVKELSSTAQLKVLEADPYFTVKLHDKTAVEKDEITLKCEVSKDVPVKWFKDGEEIVPSPKYSIKADGLRRILKIKKADLKDKGEYVCDCGTDKTKANVTVEARLIKVEKPLYGVEVFVGETAHFEIELSEPDVHGQWKLKGQPLTASPDCEIIEDGKKHILILHNCQLGMTGEVSFQAANAKSAANLKVKELPLIFITPLSDVKVFEKDEAKFECEVSREPKTFRWLKGTQEITGDDRFELIKDGTKHSMVIKSAAFEDEAKYMFEAEDKHTSGKLIIEGIRLKFLTPLKDVTAKEKESAVFTVELSHDNIRVKWFKNDQRLHTTRSVSMQDEGKTHSITFKDLSIDDTSQIRVEAMGMSSEAKLTVLEGDPYFTGKLQDYTGVEKDEVILQCEISKADAPVKWFKDGKEIKPSKNAVIKADGKKRMLILKKALKSDIGQYTCDCGTDKTSGKLDIEDREIKLVRPLHSVEVMETETARFETEISEDDIHANWKLKGEALLQTPDCEIKEEGKIHSLVLHNCRLDQTGGVDFQAANVKSSAHLRVKPRVIGLLRPLKDVTVTAGETATFDCELSYEDIPVEWYLKGKKLEPSDKVVPRSEGKVHTLTLRDVKLEDAGEVQLTAKDFKTHANLFVKEPPVEFTKPLEDQTVEEGATAVLECEVSRENAKVKWFKNGTEILKSKKYEIVADGRVRKLVIHDCTPEDIKTYTCDAKDFKTSCNLNVVPPHVEFLRPLTDLQVREKEMARFECELSRENAKVKWFKDGAEIKKGKKYDIISKGAVRILVINKCLLDDEAEYSCEVRTARTSGMLTVLEEEAVFTKNLANIEVSETDTIKLVCEVSKPGAEVIWYKGDEEIIETGRYEILTEGRKRILVIQNAHLEDAGNYNCRLPSSRTDGKVKVHELAAEFISKPQNLEILEGEKAEFVCSISKESFPVQWKRDDKTLESGDKYDVIADGKKRVLVVKDATLQDMGTYVVMVGAARAAAHLTVIEKLRIVVPLKDTRVKEQQEVVFNCEVNTEGAKAKWFRNEEAIFDSSKYIILQKDLVYTLRIRDAHLDDQANYNVSLTNHRGENVKSAANLIVEEEDLRIVEPLKDIETMEKKSVTFWCKVNRLNVTLKWTKNGEEVPFDNRVSYRVDKYKHMLTIKDCGFPDEGEYIVTAGQDKSVAELLIIEAPTEFVEHLEDQTVTEFDDAVFSCQLSREKANVKWYRNGREIKEGKKYKFEKDGSIHRLIIKDCRLDDECEYACGVEDRKSRARLFVEEIPVEIIRPPQDILEAPGADVVFLAELNKDKVEVQWLRNNMVVVQGDKHQMMSEGKIHRLQICDIKPRDQGEYRFIAKDKEARAKLELAAAPKIKTADQDLVVDVGKPLTMVVPYDAYPKAEAEWFKENEPLSTKTIDTTAEQTSFRILEAKKGDKGRYKIVLQNKHGKAEGFINLKVIDVPGPVRNLEVTETFDGEVSLAWEEPLTDGGSKIIGYVVERRDIKRKTWVLATDRAESCEFTVTGLQKGGVEYLFRVSARNRVGTGEPVETDNPVEARSKYDVPGPPLNVTITDVNRFGVSLTWEPPEYDGGAEITNYVIELRDKTSIRWDTAMTVRAEDLSATVTDVVEGQEYSFRVRAQNRIGVGKPSAATPFVKVADPIERPSPPVNLTSSDQTQSSVQLKWEPPLKDGGSPILGYIIERCEEGKDNWIRCNMKLVPELTYKVTGLEKGNKYLYRVSAENKAGVSDPSEILGPLTADDAFVEPTMDLSAFKDGLEVIVPNPITILVPSTGYPRPTATWCFGDKVLETGDRVKMKTLSAYAELVISPSERSDKGIYTLKLENRVKTISGEIDVNVIARPSAPKELKFGDITKDSVHLTWEPPDDDGGSPLTGYVVEKREVSRKTWTKVMDFVTDLEFTVPDLVQGKEYLFKVCARNKCGPGEPAYVDEPVNMSTPATVPDPPENVKWRDRTANSIFLTWDPPKNDGGSRIKGYIVERCPRGSDKWVACGEPVAETKMEVTGLEEGKWYAYRVKALNRQGASKPSRPTEEIQAVDTQEAPEIFLDVKLLAGLTVKAGTKIELPATVTGKPEPKITWTKADMILKQDKRITIENVPKKSTVTIVDSKRSDTGTYIIEAVNVCGRATAVVEVNVLDKPGPPAAFDITDVTNESCLLTWNPPRDDGGSKITNYVVERRATDSEVWHKLSSTVKDTNFKATKLIPNKEYIFRVAAENMYGVGEPVQASPITAKYQFDPPGPPTRLEPSDITKDAVTLTWCEPDDDGGSPITGYWVERLDPDTDKWVRCNKMPVKDTTYRVKGLTNKKKYRFRVLAENLAGPGKPSKSTEPILIKDPIDPPWPPGKPTVKDVGKTSVRLNWTKPEHDGGAKIESYVIEMLKTGTDEWVRVAEGVPTTQHLLPGLMEGQEYSFRVRAVNKAGESEPSEPSDPVLCREKLYPPSPPRWLEVINITKNTADLKWTVPEKDGGSPITNYIVEKRDVRRKGWQTVDTTVKDTKCTVTPLTEGSLYVFRVAAENAIGQSDYTEIEDSVLAKDTFTTPGPPYALAVVDVTKRHVDLKWEPPKNDGGRPIQRYVIEKKERLGTRWVKAGKTAGPDCNFRVTDVIEGTEVQFQVRAENEAGVGHPSEPTEILSIEDPTSPPSPPLDLHVTDAGRKHIAIAWKPPEKNGGSPIIGYHVEMCPVGTEKWMRVNSRPIKDLKFKVEEGVVPDKEYVLRVRAVNAIGVSEPSEISENVVAKDPDCKPTIDLETHDIIVIEGEKLSIPVPFRAVPVPTVSWHKDGKEVKASDRLTMKNDHISAHLEVPKSVRADAGIYTITLENKLGSATASINVKVIGLPGPCKDIKASDITKSSCKLTWEPPEFDGGTPILHYVLERREAGRRTYIPVMSGENKLSWTVKDLIPNGEYFFRVKAVNKVGGGEYIELKNPVIAQDPKQPPDPPVDVEVHNPTAEAMTITWKPPLYDGGSKIMGYIIEKIAKGEERWKRCNEHLVPILTYTAKGLEEGKEYQFRVRAENAAGISEPSRATPPTKAVDPIDAPKVILRTSLEVKRGDEIALDASISGSPYPTITWIKDENVIVPEEIKKRAAPLVRRRKGEVQEEEPFVLPLTQRLSIDNSKKGESQLRVRDSLRPDHGLYMIKVENDHGIAKAPCTVSVLDTPGPPINFVFEDIRKTSVLCKWEPPLDDGGSEIINYTLEKKDKTKPDSEWIVVTSTLRHCKYSVTKLIEGKEYLFRVRAENRFGPGPPCVSKPLVAKDPFGPPDAPDKPIVEDVTSNSMLVKWNEPKDNGSPILGYWLEKREVNSTHWSRVNKSLLNALKANVDGLLEGLTYVFRVCAENAAGPGKFSPPSDPKTAHDPISPPGPPIPRVTDTSSTTIELEWEPPAFNGGGEIVGYFVDKQLVGTNEWSRCTEKMIKVRQYTVKEIREGADYKLRVSAVNAAGEGPPGETQPVTVAEPQEPPAVELDVSVKGGIQIMAGKTLRIPAVVTGRPVPTKVWTKEEGELDKDRVVIDNVGTKSELIIKDALRKDHGRYVITATNSCGSKFAAARVEVFDVPGPVLDLKPVVTNRKMCLLNWSDPEDDGGSEITGFIIERKDAKMHTWRQPIETERSKCDITGLLEGQEYKFRVIAKNKFGCGPPVEIGPILAVDPLGPPTSPERLTYTERTKSTITLDWKEPRSNGGSPIQGYIIEKRRHDKPDFERVNKRLCPTTSFLVENLDEHQMYEFRVKAVNEIGESEPSLPLNVVIQDDEVPPTIKLRLSVRGDTIKVKAGEPVHIPADVTGLPMPKIEWSKNETVIEKPTDALQITKEEVSRSEAKTELSIPKAVREDKGTYTVTASNRLGSVFRNVHVEVYDRPSPPRNLAVTDIKAESCYLTWDAPLDNGGSEITHYVIDKRDASRKKAEWEEVTNTAVEKRYGIWKLIPNGQYEFRVRAVNKYGISDECKSDKVVIQDPYRLPGPPGKPKVLARTKGSMLVSWTPPLDNGGSPITGYWLEKREEGSPYWSRVSRAPITKVGLKGVEFNVPRLLEGVKYQFRAMAINAAGIGPPSEPSDPEVAGDPIFPPGPPSCPEVKDKTKSSISLGWKPPAKDGGSPIKGYIVEMQEEGTTDWKRVNEPDKLITTCECVVPNLKELRKYRFRVKAVNEAGESEPSDTTGEIPATDIQEEPEVFIDIGAQDCLVCKAGSQIRIPAVIKGRPTPKSSWEFDGKAKKAMKDGVHDIPEDAQLETAENSSVIIIPECKRSHTGKYSITAKNKAGQKTANCRVKVMDVPGPPKDLKVSDITRGSCRLSWKMPDDDGGDRIKGYVIEKRTIDGKAWTKVNPDCGSTTFVVPDLLSEQQYFFRVRAENRFGIGPPVETIQRTTARDPIYPPDPPIKLKIGLITKNTVHLSWKPPKNDGGSPVTHYIVECLAWDPTGTKKEAWRQCNKRDVEELQFTVEDLVEGGEYEFRVKAVNAAGVSKPSATVGPCDCQRPDMPPSIDLKEFMEVEEGTNVNIVAKIKGVPFPTLTWFKAPPKKPDNKEPVLYDTHVNKLVVDDTCTLVIPQSRRSDTGLYTITAVNNLGTASKEMRLNVLGRPGPPVGPIKFESVSADQMTLSWFPPKDDGGSKITNYVIEKREANRKTWVHVSSEPKECTYTIPKLLEGHEYVFRIMAQNKYGIGEPLDSEPETARNLFSVPGAPDKPTVSSVTRNSMTVNWEEPEYDGGSPVTGYWLEMKDTTSKRWKRVNRDPIKAMTLGVSYKVTGLIEGSDYQFRVYAINAAGVGPASLPSDPATARDPIAPPGPPFPKVTDWTKSSADLEWSPPLKDGGSKVTGYIVEYKEEGKEEWEKGKDKEVRGTKLVVTGLKEGAFYKFRVSAVNIAGIGEPGEVTDVIEMKDRLVSPDLQLDASVRDRIVVHAGGVIRIIAYVSGKPPPTVTWNMNERTLPQEATIETTAISSSMVIKNCQRSHQGVYSLLAKNEAGERKKTIIVDVLDVPGPVGTPFLAHNLTNESCKLTWFSPEDDGGSPITNYVIEKRESDRRAWTPVTYTVTRQNATVQGLIQGKAYFFRIAAENSIGMGPFVETSEALVIREPITVPERPEDLEVKEVTKNTVTLTWNPPKYDGGSEIINYVLESRLIGTEKFHKVTNDNLLSRKYTVKGLKEGDTYEYRVSAVNIVGQGKPSFCTKPITCKDELAPPTLHLDFRDKLTIRVGEAFALTGRYSGKPKPKVSWFKDEADVLEDDRTHIKTTPATLALEKIKAKRSDSGKYCVVVENSTGSRKGFCQVNVVDRPGPPVGPVSFDEVTKDYMVISWKPPLDDGGSKITNYIIEKKEVGKDVWMPVTSASAKTTCKVSKLLEGKDYIFRIHAENLYGISDPLVSDSMKAKDRFRVPDAPDQPIVTEVTKDSALVTWNKPHDGGKPITNYILEKRETMSKRWARVTKDPIHPYTKFRVPDLLEGCQYEFRVSAENEIGIGDPSPPSKPVFAKDPIAKPSPPVNPEAIDTTCNSVDLTWQPPRHDGGSKILGYIVEYQKVGDEEWRRANHTPESCPETKYKVTGLRDGQTYKFRVLAVNAAGESDPAHVPEPVLVKDRLEPPELILDANMAREQHIKVGDTLRLSAIIKGVPFPKVTWKKEDRDAPTKARIDVTPVGSKLEIRNAAHEDGGIYSLTVENPAGSKTVSVKVLVLDKPGPPRDLEVSEIRKDSCYLTWKEPLDDGGSVITNYVVERRDVASAQWSPLSATSKKKSHFAKHLNEGNQYLFRVAAENQYGRGPFVETPKPIKALDPLHPPGPPKDLHHVDVDKTEVSLVWNKPDRDGGSPITGYLVEYQEEGTQDWIKFKTVTNLECVVTGLQQGKTYRFRVKAENIVGLGLPDTTIPIECQEKLVPPSVELDVKLIEGLVVKAGTTVRFPAIIRGVPVPTAKWTTDGSEIKTDEHYTVETDNFSSVLTIKNCLRRDTGEYQITVSNAAGSKTVAVHLTVLDVPGPPTGPINILDVTPEHMTISWQPPKDDGGSPVINYIVEKQDTRKDTWGVVSSGSSKTKLKIPHLQKGCEYVFRVRAENKIGVGPPLDSTPTVAKHKFSPPSPPGKPVVTDITENAATVSWTLPKSDGGSPITGYYMERREVTGKWVRVNKTPIADLKFRVTGLYEGNTYEFRVFAENLAGLSKPSPSSDPIKACRPIKPPGPPINPKLKDKSRETADLVWTKPLSDGGSPILGYVVECQKPGTAQWNRINKDELIRQCAFRVPGLIEGNEYRFRIKAANIVGEGEPRELAESVIAKDILHPPEVELDVTCRDVITVRVGQTIRILARVKGRPEPDITWTKEGKVLVREKRVDLIQDLPRVELQIKEAVRADHGKYIISAKNSSGHAQGSAIVNVLDRPGPCQNLKVTNVTKENCTISWENPLDNGGSEITNFIVEYRKPNQKGWSIVASDVTKRLIKANLLANNEYYFRVCAENKVGVGPTIETKTPILAINPIDRPGEPENLHIADKGKTFVYLKWRRPDYDGGSPNLSYHVERRLKGSDDWERVHKGSIKETHYMVDRCVENQIYEFRVQTKNEGGESDWVKTEEVVVKEDLQKPVLDLKLSGVLTVKAGDTIRLEAGVRGKPFPEVAWTKDKDATDLTRSPRVKIDTRADSSKFSLTKAKRSDGGKYVVTATNTAGSFVAYATVNVLDKPGPVRNLKIVDVSSDRCTVCWDPPEDDGGCEIQNYILEKCETKRMVWSTYSATVLTPGTTVTRLIEGNEYIFRVRAENKIGTGPPTESKPVIAKTKYDKPGRPDPPEVTKVSKEEMTVVWNPPEYDGGKSITGYFLEKKEKHSTRWVPVNKSAIPERRMKVQNLLPDHEYQFRVKAENEIGIGEPSLPSRPVVAKDPIEPPGPPTNFRVVDTTKHSITLGWGKPVYDGGAPIIGYVVEMRPKIADASPDEGWKRCNAAAQLVRKEFTVTSLDENQEYEFRVCAQNQVGIGRPAELKEAIKPKEILEPPEIDLDASMRKLVIVRAGCPIRLFAIVRGRPAPKVTWRKVGIDNVVRKGQVDLVDTMAFLVIPNSTRDDSGKYSLTLVNPAGEKAVFVNVRVLDTPGPVSDLKVSDVTKTSCHVSWAPPENDGGSQVTHYIVEKREADRKTWSTVTPEVKKTSFHVTNLVPGNEYYFRVTAVNEYGPGVPTDVPKPVLASDPLSEPDPPRKLEVTEMTKNSATLAWLPPLRDGGAKIDGYITSYREEEQPADRWTEYSVVKDLSLVVTGLKEGKKYKFRVAARNAVGVSLPREAEGVYEAKEQLLPPKILMPEQITIKAGKKLRIEAHVYGKPHPTCKWKKGEDEVVTSSHLAVHKADSSSILIIKDVTRKDSGYYSLTAENSSGTDTQKIKVVVMDAPGPPQPPFDISDIDADACSLSWHIPLEDGGSNITNYIVEKCDVSRGDWVTALASVTKTSCRVGKLIPGQEYIFRVRAENRFGISEPLTSPKMVAQFPFGVPSEPKNARVTKVNKDCIFVAWDRPDSDGGSPIIGYLIERKERNSLLWVKANDTLVRSTEYPCAGLVEGLEYSFRIYALNKAGSSPPSKPTEYVTARMPVDPPGKPEVIDVTKSTVSLIWARPKHDGGSKIIGYFVEACKLPGDKWVRCNTAPHQIPQEEYTATGLEEKAQYQFRAIARTAVNISPPSEPSDPVTILAENVPPRIDLSVAMKSLLTVKAGTNVCLDATVFGKPMPTVSWKKDGTLLKPAEGIKMAMQRNLCTLELFSVNRKDSGDYTITAENSSGSKSATIKLKVLDKPGPPASVKINKMYSDRAMLSWEPPLEDGGSEITNYIVDKRETSRPNWAQVSATVPITSCSVEKLIEGHEYQFRICAENKYGVGDPVFTEPAIAKNPYDPPGRCDPPVISNITKDHMTVSWKPPADDGGSPITGYLLEKRETQAVNWTKVNRKPIIERTLKATGLQEGTEYEFRVTAINKAGPGKPSDASKAAYARDPQYPPAPPAFPKVYDTTRSSVSLSWGKPAYDGGSPIIGYLVEVKRADSDNWVRCNLPQNLQKTRFEVTGLMEDTQYQFRVYAVNKIGYSDPSDVPDKHYPKDILIPPEGELDADLRKTLILRAGVTMRLYVPVKGRPPPKITWSKPNVNLRDRIGLDIKSTDFDTFLRCENVNKYDAGKYILTLENSCGKKEYTIVVKVLDTPGPPVNVTVKEISKDSAYVTWEPPIIDGGSPIINYVVQKRDAERKSWSTVTTECSKTSFRVANLEEGKSYFFRVFAENEYGIGDPGETRDAVKASQTPGPVVDLKVRSVSKSSCSIGWKKPHSDGGSRIIGYVVDFLTEENKWQRVMKSLSLQYSAKDLTEGKEYTFRVSAENENGEGTPSEITVVARDDVVAPDLDLKGLPDLCYLAKENSNFRLKIPIKGKPAPSVSWKKGEDPLATDTRVSVESSAVNTTLIVYDCQKSDAGKYTITLKNVAGTKEGTISIKVVGKPGIPTGPIKFDEVTAEAMTLKWAPPKDDGGSEITNYILEKRDSVNNKWVTCASAVQKTTFRVTRLHEGMEYTFRVSAENKYGVGEGLKSEPIVARHPFDVPDAPPPPNIVDVRHDSVSLTWTDPKKTGGSPITGYHLEFKERNSLLWKRANKTPIRMRDFKVTGLTEGLEYEFRVMAINLAGVGKPSLPSEPVVALDPIDPPGKPEVINITRNSVTLIWTEPKYDGGHKLTGYIVEKRDLPSKSWMKANHVNVPECAFTVTDLVEGGKYEFRIRAKNTAGAISAPSESTETIICKDEYEAPTIVLDPTIKDGLTIKAGDTIVLNAISILGKPLPKSSWSKAGKDIRPSDITQITSTPTSSMLTIKYATRKDAGEYTITATNPFGTKVEHVKVTVLDVPGPPGPVEISNVSAEKATLTWTPPLEDGGSPIKSYILEKRETSRLLWTVVSEDIQSCRHVATKLIQGNEYIFRVSAVNHYGKGEPVQSEPVKMVDRFGPPGPPEKPEVSNVTKNTATVSWKRPVDDGGSEITGYHVERREKKSLRWVRAIKTPVSDLRCKVTGLQEGSTYEFRVSAENRAGIGPPSEASDSVLMKDAAYPPGPPSNPHVTDTTKKSASLAWGKPHYDGGLEITGYVVEHQKVGDEAWIKDTTGTALRITQFVVPDLQTKEKYNFRISAINDAGVGEPAVIPDVEIVEREMAPDFELDAELRRTLVVRAGLSIRIFVPIKGRPAPEVTWTKDNINLKNRANIENTESFTLLIIPECNRYDTGKFVMTIENPAGKKSGFVNVRVLDTPGPVLNLRPTDITKDSVTLHWDLPLIDGGSRITNYIVEKREATRKSYSTATTKCHKCTYKVTGLSEGCEYFFRVMAENEYGIGEPTETTEPVKASEAPSPPDSLNIMDITKSTVSLAWPKPKHDGGSKITGYVIEAQRKGSDQWTHITTVKGLECVVRNLTEGEEYTFQVMAVNSAGRSAPRESRPVIVKEQTMLPELDLRGIYQKLVIAKAGDNIKVEIPVLGRPKPTVTWKKGDQILKQTQRVNFETTATSTILNINECVRSDSGPYPLTARNIVGEVGDVITIQVHDIPGPPTGPIKFDEVSSDFVTFSWDPPENDGGVPISNYVVEMRQTDSTTWVELATTVIRTTYKATRLTTGLEYQFRVKAQNRYGVGPGITSACIVANYPFKVPGPPGTPQVTAVTKDSMTISWHEPLSDGGSPILGYHVERKERNGILWQTVSKALVPGNIFKSSGLTDGIAYEFRVIAENMAGKSKPSKPSEPMLALDPIDPPGKPVPLNITRHTVTLKWAKPEYTGGFKITSYIVEKRDLPNGRWLKANFSNILENEFTVSGLTEDAAYEFRVIAKNAAGAISPPSEPSDAITCRDDVEAPKIKVDVKFKDTVILKAGEAFRLEADVSGRPPPTMEWSKDGKELEGTAKLEIKIADFSTNLVNKDSTRRDSGAYTLTATNPGGFAKHIFNVKVLDRPGPPEGPLAVTEVTSEKCVLSWFPPLDDGGAKIDHYIVQKRETSRLAWTNVASEVQVTKLKVTKLLKGNEYIFRVMAVNKYGVGEPLESEPVLAVNPYGPPDPPKNPEVTTITKDSMVVCWGHPDSDGGSEIINYIVERRDKAGQRWIKCNKKTLTDLRYKVSGLTEGHEYEFRIMAENAAGISAPSPTSPFYKACDTVFKPGPPGNPRVLDTSRSSISIAWNKPIYDGGSEITGYMVEIALPEEDEWQIVTPPAGLKATSYTITGLTENQEYKIRIYAMNSEGLGEPALVPGTPKAEDRMLPPEIELDADLRKVVTIRACCTLRLFVPIKGRPAPEVKWARDHGESLDKASIESTSSYTLLIVGNVNRFDSGKYILTVENSSGSKSAFVNVRVLDTPGPPQDLKVKEVTKTSVTLTWDPPLLDGGSKIKNYIVEKRESTRKAYSTVATNCHKTSWKVDQLQEGCSYYFRVLAENEYGIGLPAETAESVKASERPLPPGKITLMDVTRNSVSLSWEKPEHDGGSRILGYIVEMQTKGSDKWATCATVKVTEATITGLIQGEEYSFRVSAQNEKGISDPRQLSVPVIAKDLVIPPAFKLLFNTFTVLAGEDLKVDVPFIGRPTPAVTWHKDNVPLKQTTRVNAESTENNSLLTIKDACREDVGHYVVKLTNSAGEAIETLNVIVLDKPGPPTGPVKMDEVTADSITLSWGPPKYDGGSSINNYIVEKRDTSTTTWQIVSATVARTTIKACRLKTGCEYQFRIAAENRYGKSTYLNSEPTVAQYPFKVPGPPGTPVVTLSSRDSMEVQWNEPISDGGSRVIGYHLERKERNSILWVKLNKTPIPQTKFKTTGLEEGVEYEFRVSAENIVGIGKPSKVSECYVARDPCDPPGRPEAIIVTRNSVTLQWKKPTYDGGSKITGYIVEKKELPEGRWMKASFTNIIDTHFEVTGLVEDHRYEFRVIARNAAGVFSEPSESTGAITARDEVDPPRISMDPKYKDTIVVHAGESFKVDADIYGKPIPTIQWIKGDQELSNTARLEIKSTDFATSLSVKDAVRVDSGNYILKAKNVAGERSVTVNVKVLDRPGPPEGPVVISGVTAEKCTLAWKPPLQDGGSDIINYIVERRETSRLVWTVVDANVQTLSCKVTKLLEGNEYTFRIMAVNKYGVGEPLESEPVVAKNPFVVPDAPKAPEVTTVTKDSMIVVWERPASDGGSEILGYVLEKRDKEGIRWTRCHKRLIGELRLRVTGLIENHDYEFRVSAENAAGLSEPSPPSAYQKACDPIYKPGPPNNPKVIDITRSSVFLSWSKPIYDGGCEIQGYIVEKCDVSVGEWTMCTPPTGINKTNIEVEKLLEKHEYNFRICAINKAGVGEHADVPGPIIVEEKLEAPDIDLDLELRKIINIRAGGSLRLFVPIKGRPTPEVKWGKVDGEIRDAAIIDVTSSFTSLVLDNVNRYDSGKYTLTLENSSGTKSAFVTVRVLDTPSPPVNLKVTEITKDSVSITWEPPLLDGGSKIKNYIVEKREATRKSYAAVVTNCHKNSWKIDQLQEGCSYYFRVTAENEYGIGLPAQTADPIKVAEVPQPPGKITVDDVTRNSVSLSWTKPEHDGGSKIIQYIVEMQAKHSEKWSECARVKSLQAVITNLTQGEEYLFRVVAVNEKGRSDPRSLAVPIVAKDLVIEPDVKPAFSSYSVQVGQDLKIEVPISGRPKPTITWTKDGLPLKQTTRINVTDSLDLTTLSIKETHKDDGGQYGITVANVVGQKTASIEIVTLDKPDPPKGPVKFDDVSAESITLSWNPPLYTGGCQITNYIVQKRDTTTTVWDVVSATVARTTLKVTKLKTGTEYQFRIFAENRYGQSFALESDPIVAQYPYKEPGPPGTPFATAISKDSMVIQWHEPVNNGGSPVIGYHLERKERNSILWTKVNKTIIHDTQFKAQNLEEGIEYEFRVYAENIVGVGKASKNSECYVARDPCDPPGTPEPIMVKRNEITLQWTKPVYDGGSMITGYIVEKRDLPDGRWMKASFTNVIETQFTVSGLTEDQRYEFRVIAKNAAGAISKPSDSTGPITAKDEVELPRISMDPKFRDTIVVNAGETFRLEADVHGKPLPTIEWLRGDKEIEESARCEIKNTDFKALLIVKDAIRIDGGQYILRASNVAGSKSFPVNVKVLDRPGPPEGPVQVTGVTSEKCSLTWSPPLQDGGSDISHYVVEKRETSRLAWTVVASEVVTNSLKVTKLLEGNEYVFRIMAVNKYGVGEPLESAPVLMKNPFVLPGPPKSLEVTNIAKDSMTVCWNRPDSDGGSEIIGYIVEKRDRSGIRWIKCNKRRITDLRLRVTGLTEDHEYEFRVSAENAAGVGEPSPATVYYKACDPVFKPGPPTNAHIVDTTKNSITLAWGKPIYDGGSEILGYVVEICKADEEEWQIVTPQTGLRVTRFEISKLTEHQEYKIRVCALNKVGLGEATSVPGTVKPEDKLEAPELDLDSELRKGIVVRAGGSARIHIPFKGRPTPEITWSREEGEFTDKVQIEKGVNYTQLSIDNCDRNDAGKYILKLENSSGSKSAFVTVKVLDTPGPPQNLAVKEVRKDSAFLVWEPPIIDGGAKVKNYVIDKRESTRKAYANVSSKCSKTSFKVENLTEGAIYYFRVMAENEFGVGVPVETVDAVKAAEPPSPPGKVTLTDVSQTSASLMWEKPEHDGGSRVLGYVVEMQPKGTEKWSIVAESKVCNAVVTGLSSGQEYQFRVKAYNEKGKSDPRVLGVPVIAKDLTIQPSLKLPFNTYSIQAGEDLKIEIPVIGRPRPNISWVKDGEPLKQTTRVNVEETATSTVLHIKEGNKDDFGKYTVTATNSAGTATENLSVIVLEKPGPPVGPVRFDEVSADFVVISWEPPAYTGGCQISNYIVEKRDTTTTTWHMVSATVARTTIKITKLKTGTEYQFRIFAENRYGKSAPLDSKAVIVQYPFKEPGPPGTPFVTSISKDQMLVQWHEPVNDGGTKIIGYHLEQKEKNSILWVKLNKTPIQDTKFKTTGLDEGLEYEFKVSAENIVGIGKPSKVSECFVARDPCDPPGRPEAIVITRNNVTLKWKKPAYDGGSKITGYIVEKKDLPDGRWMKASFTNVLETEFTVSGLVEDQRYEFRVIARNAAGNFSEPSDSSGAITARDEIDAPNASLDPKYKDVIVVHAGETFVLEADIRGKPIPDVVWSKDGKELEETAARMEIKSTIQKTTLVVKDCIRTDGGQYILKLSNVGGTKSIPITVKVLDRPGPPEGPLKVTGVTAEKCYLAWNPPLQDGGANISHYIIEKRETSRLSWTQVSTEVQALNYKVTKLLPGNEYIFRVMAVNKYGIGEPLESGPVTACNPYKPPGPPSTPEVSAITKDSMVVTWARPVDDGGTEIEGYILEKRDKEGVRWTKCNKKTLTDLRLRVTGLTEGHSYEFRVAAENAAGVGEPSEPSVFYRACDALYPPGPPSNPKVTDTSRSSVSLAWSKPIYDGGAPVKGYVVEVKEAAADEWTTCTPPTGLQGKQFTVTKLKENTEYNFRICAINSEGVGEPATLPGSVVAQERIEPPEIELDADLRKVVVLRASATLRLFVTIKGRPEPEVKWEKAEGILTDRAQIEVTSSFTMLVIDNVTRFDSGRYNLTLENNSGSKTAFVNVRVLDSPSAPVNLTIREVKKDSVTLSWEPPLIDGGAKITNYIVEKRETTRKAYATITNNCTKTTFRIENLQEGCSYYFRVLASNEYGIGLPAETTEPVKVSEPPLPPGRVTLVDVTRNTATIKWEKPESDGGSKITGYVVEMQTKGSEKWSTCTQVKTLEATISGLTAGEEYVFRVAAVNEKGRSDPRQLGVPVIARDIEIKPSVELPFHTFNVKAREQLKIDVPFKGRPQATVNWRKDGQTLKETTRVNVSSSKTVTSLSIKEASKEDVGTYELCVSNSAGSITVPITIIVLDRPGPPGPIRIDEVSCDSITISWNPPEYDGGCQISNYIVEKKETTSTTWHIVSQAVARTSIKIVRLTTGSEYQFRVCAENRYGKSSYSESSAVVAEYPFSPPGPPGTPKVVHATKSTMLVTWQVPVNDGGSRVIGYHLEYKERSSILWSKANKILIADTQMKVSGLDEGLMYEYRVYAENIAGIGKCSKSCEPVPARDPCDPPGQPEVTNITRKSVSLKWSKPHYDGGAKITGYIVERRELPDGRWLKCNYTNIQETYFEVTELTEDQRYEFRVFARNAADSVSEPSESTGPIIVKDDVEPPRVMMDVKFRDVIVVKAGEVLKINADIAGRPLPVISWAKDGIEIEERARTEIISTDNHTLLTVKDCIRRDTGQYVLTLKNVAGTRSVAVNCKVLDKPGPPAGPLEINGLTAEKCSLSWGRPQEDGGADIDYYIVEKRETSHLAWTICEGELQMTSCKVTKLLKGNEYIFRVTGVNKYGVGEPLESVAIKALDPFTVPSPPTSLEITSVTKESMTLCWSRPESDGGSEISGYIIERREKNSLRWVRVNKKPVYDLRVKSTGLREGCEYEYRVYAENAAGLSLPSETSPLIRAEDPVFLPSPPSKPKIVDSGKTTITIAWVKPLFDGGAPITGYTVEYKKSDDTDWKTSIQSLRGTEYTISGLTTGAEYVFRVKSVNKVGASDPSDSSDPQIAKEREEEPLFDIDSEMRKTLIVKAGASFTMTVPFRGRPVPNVLWSKPDTDLRTRAYVDTTDSRTSLTIENANRNDSGKYTLTIQNVLSAASLTLVVKVLDTPGPPTNITVQDVTKESAVLSWDVPENDGGAPVKNYHIEKREASKKAWVSVTNNCNRLSYKVTNLQEGAIYYFRVSGENEFGVGIPAETKEGVKITEKPSPPEKLGVTSISKDSVSLTWLKPEHDGGSRIVHYVVEALEKGQKNWVKCAVAKSTHHVVSGLRENSEYFFRVFAENQAGLSDPRELLLPVLIKEQLEPPEIDMKNFPSHTVYVRAGSNLKVDIPISGKPLPKVTLSRDGVPLKATMRFNTEITAENLTINLKESVTADAGRYEITAANSSGTTKAFINIVVLDRPGPPTGPVVISDITEESVTLKWEPPKYDGGSQVTNYILLKRETSTAVWTEVSATVARTMMKVMKLTTGEEYQFRIKAENRFGISDHIDSACVTVKLPYTTPGPPSTPWVTNVTRESITVGWHEPVSNGGSAVVGYHLEMKDRNSILWQKANKLVIRTTHFKVTTISAGLIYEFRVYAENAAGVGKPSHPSEPVLAIDACEPPRNVRITDISKNSVSLSWQQPAFDGGSKITGYIVERRDLPDGRWTKASFTNVTETQFIISGLTQNSQYEFRVFARNAVGSISNPSEVVGPITCIDSYGGPVIDLPLEYTEVVKYRAGTSVKLRAGISGKPAPTIEWYKDDKELQTNALVCVENTTDLASILIKDADRLNSGCYELKLRNAMGSASATIRVQILDKPGPPGGPIEFKTVTAEKITLLWRPPADDGGAKITHYIVEKRETSRVVWSMVSEHLEECIITTTKIIKGNEYIFRVRAVNKYGIGEPLESDSVVAKNAFVTPGPPGIPEVTKITKNSMTVVWSRPIADGGSDISGYFLEKRDKKSLGWFKVLKETIRDTRQKVTGLTENSDYQYRVCAVNAAGQGPFSEPSEFYKAADPIDPPGPPAKIRIADSTKSSITLGWSKPVYDGGSAVTGYVVEIRQGEEEEWTTVSTKGEVRTTEYVVSNLKPGVNYYFRVSAVNCAGQGEPIEMNEPVQAKDILEAPEIDLDVALRTSVIAKAGEDVQVLIPFKGRPPPTVTWRKDEKNLGSDARYSIENTDSSSLLTIPQVTRNDTGKYILTIENGVGEPKSSTVSVKVLDTPAACQKLQVKHVSRGTVTLLWDPPLIDGGSPIINYVIEKRDATKRTWSVVSHKCSSTSFKLIDLSEKTPFFFRVLAENEIGIGEPCETTEPVKAAEVPAPIRDLSMKDSTKTSVILSWTKPDFDGGSVITEYVVERKGKGEQTWSHAGISKTCEIEVSQLKEQSVLEFRVFAKNEKGLSDPVTIGPITVKELIITPEVDLSDIPGAQVTVRIGHNVHLELPYKGKPKPSISWLKDGLPLKESEFVRFSKTENKITLSIKNAKKEHGGKYTVILDNAVCRIAVPITVITLGPPSKPKGPIRFDEIKADSVILSWDVPEDNGGGEITCYSIEKRETSQTNWRMVCSSVARTTFKVPNLVKDAEYQFRVRAENRYGVSQPLVSSIIVAKHQFRIPGPPGKPVIYNVTSDGMSLTWDAPVYDGGSEVTGFHVEKKERNSILWQKVNTSPISGREYRATGLVEGLDYQFRVYAENSAGLSSPSDPSKFTLAVSPVDPPGTPDYIDVTRETITLKWNPPLRDGGSKIVGYSIEKRQGNERWVRCNFTDVSECQYTVTGLSPGDRYEFRIIARNAVGTISPPSQSSGIIMTRDENVPPIVEFGPEYFDGLIIKSGESLRIKALVQGRPVPRVTWFKDGVEIEKRMNMEITDVLGSTSLFVRDATRDHRGVYTVEAKNASGSAKAEIKVKVQDTPGKVVGPIRFTNITGEKMTLWWDAPLNDGCAPITHYIIEKRETSRLAWALIEDKCEAQSYTAIKLINGNEYQFRVSAVNKFGVGRPLDSDPVVAQIQYTVPDAPGIPEPSNITGNSITLTWARPESDGGSEIQQYILERREKKSTRWVKVISKRPISETRFKVTGLTEGNEYEFHVMAENAAGVGPASGISRLIKCREPVNPPGPPTVVKVTDTSKTTVSLEWSKPVFDGGMEIIGYIIEMCKADLGDWHKVNAEACVKTRYTVTDLQAGEEYKFRVSAINGAGKGDSCEVTGTIKAVDRLTAPELDIDANFKQTHVVRAGASIRLFIAYQGRPTPTAVWSKPDSNLSLRADIHTTDSFSTLTVENCNRNDAGKYTLTVENNSGSKSITFTVKVLDTPGPPGPITFKDVTRGSATLMWDAPLLDGGARIHHYVVEKREASRRSWQVISEKCTRQIFKVNDLAEGVPYYFRVSAVNEYGVGEPYEMPEPIVATEQPAPPRRLDVVDTSKSSAVLAWLKPDHDGGSRITGYLLEMRQKGSDFWVEAGHTKQLTFTVERLVEKTEYEFRVKAKNDAGYSEPREAFSSVIIKEPQIEPTADLTGITNQLITCKAGSPFTIDVPISGRPAPKVTWKLEEMRLKETDRVSITTTKDRTTLTVKDSMRGDSGRYFLTLENTAGVKTFSVTVVVIGRPGPVTGPIEVSSVSAESCVLSWGEPKDGGGTEITNYIVEKRESGTTAWQLVNSSVKRTQIKVTHLTKYMEYSFRVSSENRFGVSKPLESAPIIAEHPFVPPSAPTRPEVYHVSANAMSIRWEEPYHDGGSKIIGYWVEKKERNTILWVKENKVPCLECNYKVTGLVEGLEYQFRTYALNAAGVSKASEASRPIMAQNPVDAPGRPEVTDVTRSTVSLIWSAPAYDGGSKVVGYIIERKPVSEVGDGRWLKCNYTIVSDNFFTVTALSEGDTYEFRVLAKNAAGVISKGSESTGPVTCRDEYAPPKAELDARLHGDLVTIRAGSDLVLDAAVGGKPEPKIIWTKGDKELDLCEKVSLQYTGKRATAVIKFCDRSDSGKYTLTVKNASGTKAVSVMVKVLDSPGPCGKLTVSRVTQEKCTLAWSLPQEDGGAEITHYIVERRETSRLNWVIVEGECPTLSYVVTRLIKNNEYIFRVRAVNKYGPGVPVESEPIVARNSFTIPSPPGIPEEVGTGKEHIIIQWTKPESDGGNEISNYLVDKREKKSLRWTRVNKDYVVYDTRLKVTSLMEGCDYQFRVTAVNAAGNSEPSEASNFISCREPSYTPGPPSAPRVVDTTKHSISLAWTKPMYDGGTDIVGYVLEMQEKDTDQWYRVHTNATIRNTEFTVPDLKMGQKYSFRVAAVNVKGMSEYSESIAEIEPVERIEIPDLELADDLKKTVTIRAGASLRLMVSVSGRPPPVITWSKQGIDLASRAIIDTTESYSLLIVDKVNRYDAGKYTIEAENQSGKKSATVLVKVYDTPGPCPSVKVKEVSRDSVTITWEIPTIDGGAPVNNYIVEKREAAMRAFKTVTTKCSKTLYRISGLVEGTMYYFRVLPENIYGIGEPCETSDAVLVSEVPLVPAKLEVVDVTKSTVTLAWEKPLYDGGSRLTGYVLEACKAGTERWMKVVTLKPTVLEHTVTSLNEGEQYLFRIRAQNEKGVSEPRETVTAVTVQDLRVLPTIDLSTMPQKTIHVPAGRPVELVIPIAGRPPPAASWFFAGSKLRESERVTVETHTKVAKLTIRETTIRDTGEYTLELKNVTGTTSETIKVIILDKPGPPTGPIKIDEIDATSITISWEPPELDGGAPLSGYVVEQRDAHRPGWLPVSESVTRSTFKFTRLTEGNEYVFRVAATNRFGIGSYLQSEVIECRSSIRIPGPPETLQIFDVSRDGMTLTWYPPEDDGGSQVTGYIVERKEVRADRWVRVNKVPVTMTRYRSTGLTEGLEYEHRVTAINARGSGKPSRPSKPIVAMDPIAPPGKPQNPRVTDTTRTSVSLAWSVPEDEGGSKVTGYLIEMQKVDQHEWTKCNTTPTKIREYTLTHLPQGAEYRFRVLACNAGGPGEPAEVPGTVKVTEMLEYPDYELDERYQEGIFVRQGGVIRLTIPIKGKPFPICKWTKEGQDISKRAMIATSETHTELVIKEADRGDSGTYDLVLENKCGKKAVYIKVRVIGSPNSPEGPLEYDDIQVRSVRVSWRPPADDGGADILGYILERREVPKAAWYTIDSRVRGTSLVVKGLKENVEYHFRVSAENQFGISKPLKSEEPVTPKTPLNPPEPPSNPPEVLDVTKSSVSLSWSRPKDDGGSRVTGYYIERKETSTDKWVRHNKTQITTTMYTVTGLVPDAEYQFRIIAQNDVGLSETSPASEPVVCKDPFDKPSQPGELEILSISKDSVTLQWEKPECDGGKEILGYWVEYRQSGDSAWKKSNKERIKDKQFTIGGLLEATEYEFRVFAENETGLSRPRRTAMSIKTKLTSGEAPGIRKEMKDVTTKLGEAAQLSCQIVGRPLPDIKWYRFGKELIQSRKYKMSSDGRTHTLTVMTEEQEDEGVYTCIATNEVGEVETSSKLLLQATPQFHPGYPLKEKYYGAVGSTLRLHVMYIGRPVPAMTWFHGQKLLQNSENITIENTEHYTHLVMKNVQRKTHAGKYKVQLSNVFGTVDAILDVEIQDKPDKPTGPIVIEALLKNSAVISWKPPADDGGSWITNYVVEKCEAKEGAEWQLVSSAISVTTCRIVNLTENAGYYFRVSAQNTFGISDPLEVSSVVIIKSPFEKPGAPGKPTITAVTKDSCVVAWKPPASDGGAKIRNYYLEKREKKQNKWISVTTEEIRETVFSVKNLIEGLEYEFRVKCENLGGESEWSEISEPITPKSDVPIQAPHFKEELRNLNVRYQSNATLVCKVTGHPKPIVKWYRQGKEIIADGLKYRIQEFKGGYHQLIIASVTDDDATVYQVRATNQGGSVSGTASLEVEVPAKIHLPKTLEGMGAVHALRGEVVSIKIPFSGKPDPVITWQKGQDLIDNNGHYQVIVTRSFTSLVFPNGVERKDAGFYVVCAKNRFGIDQKTVELDVADVPDPPRGVKVSDVSRDSVNLTWTEPASDGGSKITNYIVEKCATTAERWLRVGQARETRYTVINLFGKTSYQFRVIAENKFGLSKPSEPSEPTITKEDKTRAMNYDEEVDETREVSMTKASHSSTKELYEKYMIAEDLGRGEFGIVHRCVETSSKKTYMAKFVKVKGTDQVLVKKEISILNIARHRNILHLHESFESMEELVMIFEFISGLDIFERINTSAFELNEREIVSYVHQVCEALQFLHSHNIGHFDIRPENIIYQTRRSSTIKIIEFGQARQLKPGDNFRLLFTAPEYYAPEVHQHDVVSTATDMWSLGTLVYVLLSGINPFLAETNQQIIENIMNAEYTFDEEAFKEISIEAMDFVDRLLVKERKSRMTASEALQHPWLKQKIERVSTKVIRTLKHRRYYHTLIKKDLNMVVSAARISCGGAIRSQKGVSVAKVKVASIEIGPVSGQIMHAVGEEGGHVKYVCKIENYDQSTQVTWYFGVRQLENSEKYEITYEDGVAILYVKDITKLDDGTYRCKVVNDYGEDSSYAELFVKGVREVYDYYCRRTMKKIKRRTDTMRLLERPPEFTLPLYNKTAYVGENVRFGVTITVHPEPHVTWYKSGQKIKPGDNDKKYTFESDKGLYQLTINSVTTDDDAEYTVVARNKYGEDSCKAKLTVTLHPPPTDSTLRPMFKRLLANAECQEGQSVCFEIRVSGIPPPTLKWEKDGQPLSLGPNIEIIHEGLDYYALHIRDTLPEDTGYYRVTATNTAGSTSCQAHLQVERLRYKKQEFKSKEEHERHVQKQIDKTLRMAEILSGTESVPLTQVAKEALREAAVLYKPAVSTKTVKGEFRLEIEEKKEERKLRMPYDVPEPRKYKQTTIEEDQRIKQFVPMSDMKWYKKIRDQYEMPGKLDRVVQKRPKRIRLSRWEQFYVMPLPRITDQYRPKWRIPKLSQDDLEIVRPARRRTPSPDYDFYYRPRRRSLGDISDEELLLPIDDYLAMKRTEEERLRLEEELELGFSASPPSRSPPHFELSSLRYSSPQAHVKVEETRKDFRYSTYHIPTKAEASTSYAELRERHAQAAYRQPKQRQRIMAEREDEELLRPVTTTQHLSEYKSELDFMSKEEKSRKKSRRQREVTEITEIEEEYEISKHAQRESSSSASRLLRRRRSLSPTYIELMRPVSELIRSRPQPAEEYEDDTERRSPTPERTRPRSPSPVSSERSLSRFERSARFDIFSRYESMKAALKTQKTSERKYEVLSQQPFTLDHAPRITLRMRSHRVPCGQNTRFILNVQSKPTAEVKWYHNGVELQESSKIHYTNTSGVLTLEILDCHTDDSGTYRAVCTNYKGEASDYATLDVTGGDYTTYASQRRDEEVPRSVFPELTRTEAYAVSSFKKTSEMEASSSVREVKSQMTETRESLSSYEHSASAEMKSAALEEKSLEEKSTTRKIKTTLAARILTKPRSMTVYEGESARFSCDTDGEPVPTVTWLRKGQVLSTSARHQVTTTKYKSTFEISSVQASDEGNYSVVVENSEGKQEAEFTLTIQKARVTEKAVTSPPRVKSPEPRVKSPEAVKSPKRVKSPEPSHPKAVSPTETKPTPTEKVQHLPVSAPPKITQFLKAEASKEIAKLTCVVESSVLRAKEVTWYKDGKKLKENGHFQFHYSADGTYELKINNLTESDQGEYVCEISGEGGTSKTNLQFMGQAFKSIHEKVSKISETKKSDQKTTESTVTRKTEPKAPEPISSKPVIVTGLQDTTVSSDSVAKFAVKATGEPRPTAIWTKDGKAITQGGKYKLSEDKGGFFLEIHKTDTSDSGLYTCTVKNSAGSVSSSCKLTIKAIKDTEAQKVSTQKTSEITPQKKAVVQEEISQKALRSEEIKMSEAKSQEKLALKEEASKVLISEEVKKSAATSLEKSIVHEEITKTSQASEEVRTHAEIKAFSTQMSINEGQRLVLKANIAGATDVKWVLNGVELTNSEEYRYGVSGSDQTLTIKQASHRDEGILTCISKTKEGIVKCQYDLTLSKELSDAPAFISQPRSQNINEGQNVLFTCEISGEPSPEIEWFKNNLPISISSNVSISRSRNVYSLEIRNASVSDSGKYTIKAKNFRGQCSATASLMVLPLVEEPSREVVLRTSGDTSLQGSFSSQSVQMSASKQEASFSSFSSSSASSMTEMKFASMSAQSMSSMQESFVEMSSSSFMGISNMTQLESSTSKMLKAGIRGIPPKIEALPSDISIDEGKVLTVACAFTGEPTPEVTWSCGGRKIHSQEQGRFHIENTDDLTTLIIMDVQKQDGGLYTLSLGNEFGSDSATVNIHIRSI

SEQ ID NO: 111 - DNA, 486 bp, Homo sapiens
gctgctgtgcttggagaagcagatgatgggaatctggacttggacatgaagagtggcctagaaaacactgctgccttagataatcagccaaagggcgctttgaagaagctgatttatgcagctaagttaaatgcttctttaaaagccttggaaggagaacgaaatcaagtttacactcagttatctgaagtggatcaagtaaaagaagaccttacagagcatatcaaaagtcttgagtctaaacaagcatctttgcagtcagaaaagacagagtttgaaagtgagagccagaaacttcagcagaaactgaaagtgataaccgagctgtaccaagaaaatgaaatgaaacttcacaggaaattaacagtagaagaaaattaccgattagagaaagaagaaaaactttccaaagtagatgagaaaatcagccatgcgaccgaggagctggagacctgcaggcagcgtgccaaggatcttgaagaagag

SEQ ID NO: 112 - DNA, 891 bp, Mus musculus
ggaatcatgcatcggactacacggatcaaaatcacagagctgaacccccacctcatgtgtgccctctgcggggggtacttcatcgacgccaccactatcgtggagtgcctgcattccttctgcaaaacctgcatcgtgcgctacctggagaccaacaaatactgccccatgtgtgacgtgcaggtccataaaacccggccgctgctgagcatcaggtctgacaaaacacttcaagacattgtctacaaattggtccctgggctttttaaagatgagatgaaacggcggcgggatttctatgcagcgtaccccctgacggaggtccccaacggctccaatgaggaccgcggcgaggtcttggagcaggagaagggggctctgagtgatgatgagattgtcagcctctccatcgaattctacgaaggtgccggggaccgggacgagaagaagggccccctggagaatggggatggggacaaagagaaaacaggggtgcgcttcctgcgatgcccagcagccatgaccgtcatgcatcttgccaagtttctccgcaacaagatggatgtgcccagcaagtacaaggtggaggttctgtacgaggacgagccactgaaggaatactacaccctcatggacatcgcctacatctacccctggcggcggaacgggcctctccccctcaagtaccgtgtccagccagcctgcaagcggctcaccctagccacggtgcccaccccctccgagggcaccaacaccagcggggcgtccgagtccagtggggccaccacagctgccaacgggggtagcttgaactgcctgcagacaccatcctccaccagcagggggcgcaagatgactgtcaacggcgctcccgtgccccccttaacttga

SEQ ID NO: 113 - DNA, 783 bp, Mus musculus
agtccgtacagtccccggggcggctccaatgtcatccagtgctaccgctgcggagacacctgcaaaggggaggtggtccgtgtccacaacaaccacttccacatccgatgcttcacttgtcaagtatgtggatgtggcctggcccagtcgggcttcttcttcaagaaccaggagtacatctgcgcccaggactaccaacagctttatggcacccgctgtgatagctgccgggacttcatcacgggtgaggtcatctctgccctgggccgtacctaccgccctaaatgcttcgtatgcagcttgtgcaggaagcctttccctattggagataaggtgaccttcagtgggaaagaatgtgtatgtcagacgtgctcccagtcaatgaccagcagcaagccgatcaagatccgtggaccaagccactgtgctgggtgcaaagaggagattaaacatggccagtcacttctggcactggacaagcagtggcacgtcagctgtttcaaatgccagacctgtagcgtcatcctcactggggaatacattagcaaagacggtgttccatactgcgagtctgactaccactcccagtttggcatcaaatgtgagacttgtgaccggtacatcagtggcagggtcttggaggcaggagggaaacactaccaccctacctgtgccagatgtgtacgctgccaccagatgttcactgagggggaggagatgtatctcacaggttctgaggtttggcacccaatctgcaagcaggcagccagggcagagaagaag

SEQ ID NO: 114 - DNA, 723 bp, Mus musculus
gcaacatcaggtgactgtcccagaagtgaatcgcagggagaagagcctgctgagtgcagtgaggcgggtctcctgcaggagggagtacagccagaggagtttgtggccatcgcggactacgctgccaccgatgagacccagctcagttttttgagaggagaaaaaattcttatcctgagacaaaccactgcagattggtggtggggtgagcgtgcgggctgctgtgggtacattccggcaaactatgtggggaagcacgtggatgagtacgaccccgaggacacgtggcaggatgaagagtacttcggcagctatggaactctgaaactccacttggagatgttggcagaccagccacgaacaactaaataccacagtgtcatcctgcagaataaagaatccctgacggataaagtcatcctggacgtgggctgtgggactgggatcatcagtctcttctgtgcacactatgcgcggcctagagcggtgtacgcggtggaggccagtgagatggcacagcacacggggcagctggtcctgcagaacggctttgctgacatcatcaccgtgtaccagcagaaggtggaggatgtggtgctgcccgagaaggtggacgtgctggtgtctgagtggatggggacctgcctgctgaagcagcaaagttctgagggagacgcaagtaaagataccacaggtgtcctagattgtcaacagaccatttaa

SEQ ID NO: 115 - protein, 291 aa, Homo sapiens
QLVQNATFRCILATLLAVGNFLNGSQSSGFELSYLEKVSDVKDTVRRQSLLHHLCSLVLQTRPESSDLYSEIPALTRCAKVDFEQLTENLGQLERRSRAAEESLRSLAKHELAPALRARLTHFLDQCARRVAMLRIVHRRVCNRFHAFLLYLGYTPQAAREVRIMQFCHTLREFALEYRTCRERVLQQQQKQATYRERNKTRGRMITETEKFSGVAGEAPSNPSVPVAVSSGPGRGDADSHASMKSLLTSRLEDTTHNRRSRGMVQSSSPIMPTVGPSTASPEEPPGSSLP

SEQ ID NO: 116 - protein, 214 aa, Homo sapiens
CNRFHAFLLYLGYTPQAAREVRIMQFCHTLREFALEYRTCRERVLQQQQKQATYRERNKTRGRMITETEKFSGVAGEAPSNPSVPVAVSSGPGRGDADSHASMKSLLTSRLEDTTHNRRSRGMVQSSSPIMPTVGPSTASPEEPPGSSLPSDTSDEIMDLLVQSVTKSSPRALAARERKRSRGNRKSLRRTLKSGLGDDLVQALGLSKGPGLEV

SEQ ID NO: 117 - protein, 164 aa, Homo sapiens
QATYRERNKTRGRMITETEKFSGVAGEAPSNPSVPVAVSSGPGRGDADSHASMKSLLTSRLEDTTHNRRSRGMVQSSSPIMPTVGPSTASPEEPPGSSLPSDTSDEIMDLLVQSVTKSSPRALAARERKRSRGNRKSLRRTLKSGLGDDLVQALGLSKGPGLEV

SEQ ID NO: 118 - protein, 200 aa, Mus musculus
CSNLGLPSSGLASKPLPTQNGSRASMLDESSLYGARRGSACGSRAPSEYGSHLNSSSRASSRASSARASPVVEERPDKDFAEKGSRNMPSLSAATLASLGGTSSRRGSGDTSISMDTEASIREIKELNELKDQIQDVEGKYMQGLKEMKDSLAEVEEKYKKAMVSNAQLDNEKTNFMYQVDTLKDMLLELEEQLAESQRQ

SEQ ID NO: 119 - protein, 137 aa, Mus musculus
VRQVEALKAENTHLRQELRDNSSHLSKLETETSGMKEVLKHLQGKLEQEARVLVSSGQTEVLEQLKALQTDISSLYNLKFHAPALGPEPAARTPEGSPVHGSGPSKDSFGELSRATIRLLEELDQERCFLLSEIEKE

SEQ ID NO: 120 - protein, 366 aa, Mus musculus
DLKATLNSGPGAQQKEIGELKALVEGIKMEHQLELGNLQAKHDLETAMHGKEKEGLRQKLQEVQEELAGLQQHWREQLEEQASQHRLELQEAQDQCRDAQLRAQELEGLDVEYRGQAQAIEFLKEQISLAEKKMLDYEMLQRAEAQSRQEAERLREKLLVAENRLQAAESLCSAQHSHVIESSDLSEETIRMKETVEGLQDKLNKRDKEVTALTSQMDMLRAQVSALENKCKSGEKKIDSLLKEKRRLEAELEAVSRKTHDASGQLVHISQELLRKERSLNELRVLLLEANRHSPGPERDLSREVHKAEWRIKEQKLKDDIRGLREKLTGLDKEKSLSEQRRYSLIDPASPPELLKLQHQLVSTED

SEQ ID NO: 121 - protein, 154 aa, Mus musculus
QTKLRLSHRPAFMPSEGKLVSDIANAWRGLEQVEKGYEDWLLSEIRRLQRLQHLAEKFQQKASLHEAWTRGKEEMLNQHDYESASLQEVRALLRRHEAFESDLAAHQDRVEHVAALAQELNELDYHEAASVNSRCQAICDQWDNLGTLTHKRRD

SEQ ID NO: 122 - protein, 242 aa, Mus musculus
MLETLRERLLSVQQDFTSGLKTLSDKSREAKVKGKPRTAPRLPKYSAGLELLSRYEDAWAALHRRAKECADAGELVDSEVVMLSAHWEKKRTSLNELQGQLQQLPALLQDLESLMASLAHLETSFEEVENHLLHLEDLCGQCELERHKQAQAQHLESYKKSKRKELEAFKAELDTEHTQKALEMEHSQQLKLKERQKFFEEAFQQDMEQYLSTGYLQIAERREPMGSMSSMEVNVDVLKQLD

SEQ ID NO: 123 - protein, 197 aa, Mus musculus
EKGIKLLQAQKLVQYLRECEDVMDWINDKEAIVTSEELGQDLEHVEVLQKKFEEFQTDLAAHEERVNEVSQFAAKLIQEQHPEEELIKTKQDEVNAAWQRLKGLALQRQGKLFGAAEVQRFNRDVDETIGWIKEKEQLMASDDFGRDLASVQALLRKHEGLERDLAALEDKVKALCAEADRLQQSHPLSASQIQGKR

SEQ ID NO: 124 - protein, 175 aa, Mus musculus
DGNEKKIEMVRAYREKIEKELEAVCQDVLSLLDNYLIKNCSETQYESKVFYLKMKGDYYRYLAEVATGEKRATVVESSEKAYSEAHEISKEHMQPTHPIRLGLALNYSVFYYEIQNAPEQACHLAKTAFDDAIAELDTLNEDSYKDSTLIMQLLRDNLTLWTSDQQDDDGGEGNN

SEQ ID NO: 125 - protein, 190 aa, Mus musculus
RSSWRVVSSIEQKTEGAEKKQQMAREYREKIETELRDICNDVLSLLEKFLIPNASQPESKVFYLKMKGDYYRYLAEVAAGDDKKGIVDQSQQAYQEAFEISKKEMQPTHPIRLGLALNFSVFYYEILNSPEKACSLAKTALDEAIAELDTLSEESYEDSTLIMQLLRDNLTLWTSDTQGDEAEAGEGGEN

SEQ ID NO: 126 - protein, 227 aa, Homo sapiens
YDDMAACMKSVTEQGAELSNEERNLLSVAYKNVVGARRSSWRVVSSIEQKTEGAEKKQQMAREYREKIETELRDICNDVLSLLEKFLIPNASQAESKVFYLKMKGDYYRYLAEVAAGDDKKGIVDQSQQAYQEAFEISKKEMQPTHPIRLGLALNFSVFYYEILNSPEKACSLAKTAFDEAIAELDTLSEESYKDSTLIMQLLRDNLTLWTSDTQGDEAEAGEGGEN

SEQ ID NO: 127 - protein, 191 aa, Homo sapiens
DDMAACMKSVTEQGAELSNEERNLLSVAYKNVVGARRSSWRVVSSIEQKTEGAEKKQQMAREYREKIETELRDICNDVLSLLEKFLIPNASQAESKVFYLKMKGDYYRYLAEVAAGDDKKGIVDQSQQAYQEAFEISKKEMQPTHPIRLGLALNFSVFYYEILNSPEKACSLAKTAFDEAIAELDTLSEES

SEQ ID NO: 128 - protein, 172 aa, Mus musculus
SSWRVISSIEQKTERNEKKQQMGKEYREKIEAELQDICNDVLELLDKYLILNATQAESKVFYLKMKGDYFRYLSEVASGENKQTTVSNSQQAYQEAFEISKKEMQPTHPIRLGLALNFSVFYYEILNSPEKACSLAKTAFDEAIAELDTLNEESYKDSTLIMQLLRDNLTLW

SEQ ID NO: 129 - protein, 164 aa, Mus musculus
YREKVESELRSICTTVLELLDKYLIANATNPESKVFYLKMKGDYFRYLAEVACGDDRKQTIENSQGAYQEAFDISKKEMQPTHPIRLGLALNFSVFYYEILNNPELACTLAKTAFDEAIAELDTLNEDSYKDSTLIMQLLRDNLTLWTSDSAGEECDAAEGAEN

SEQ ID NO: 130 - protein, 165 aa, Homo sapiens
DYREKVESELRSICTTVLELLDKYLIANATNPESKVFYLKMKGDYFRYLAEVACGDDRKQTIDNSQGAYQEAFDISKKEMQPTHPIRLGLALNFSVFYYEILNNPELACTLAKTAFDEAIAELDTLNEDSYKDSTLIMQLLRDNLTLWTSDSAGEECDAAEGAEN

SEQ ID NO: 131 - protein, 208 aa, Mus musculus
TRLRKQALQDTLALYKMFSEADACELWIDEKEQWLNNMQIPEKLEDLEVVQHRFESLEPEMNNQASRVAVVNQIARQLMHNGHPSEREIRAQQDKLNTRWSQFRELVDRKKDALLSALSIQSYHLECNETKSWIREKTKVIESTQDLGNDLAGVMALQRKLTGMERDLVAIEAKLSDLQKEAEKLESEHPDQAQAILSRLAEISDVWE

SEQ ID NO: 132 - protein, 124 aa, Homo sapiens
DDAAVETAEEAKEPAEADITELCRDMFSKMATYLTGELTATSEDYKLLENMNKLTSLKYLEMKDIAINISRNLKDLNQKYAGLQPYLDQINVIEEQVAALEQAAYKLDAYSKKLEAKYKKLEKR

SEQ ID NO: 133 - protein, 257 aa, Homo sapiens
EKLQPSFEALKRRGEELIGRSQGADKDLAAKEIQDKLDQMVFFWEDIKARAEEREIKFLDVLELAEKFWYDMAALLTTIKDTQDIVHDLESPGIDPSIIKQQVEAAETIKEETDGLHEELEFIRILGADLIFACGETEKPEVRKSIDEMNNAWENLNKTWKERLEKLEDAMQAAVQYQDTLQAMFDWLDNTVIKLCTMPPVGTDLNTVKDQLNEMKEFKVEVYQQQIEMEKLNHQGELMLKKATDETDRDIIREPLT

SEQ ID NO: 134 - protein, 141 aa, Homo sapiens
GKILRIQLELNQVKSEVDRKIAEKDEEIDQMKRNHIRIVESMQSTLDAEIRSRNDAIRLKKKMEGDLNEMEIQLNHANRMAAEALRNYRNTQAILKDTQLHLDDALRSQEDLKEQLAMVERGANLLQAEIEELRATLEQTE

SEQ ID NO: 135 - protein, 176 aa, Homo sapiens
CLPGLAKQPSFRQYSGYLRASDSKHFHYWFVESQNDPKNSPVVLWLNGGPGCSSLDGLLTEHGPFLIQPDGVTLEYDPYAWNLIANVLYIESPAGVGFSYSDDKMYLTNDTEVAENNYEALKDFFRLFPEYKDNKLFLTGESYAGIYIPTLAVLVMQDPSMNLQGLAVGNGLASYE

SEQ ID NO: 136 - protein, 277 aa, Mus musculus
HVQPQPVSSANTQPRGPLSQAPTPAPKFAPVAPKFTPVVSKFSPGAPSGPGPQPNQKMVPPDAPSSVSTGSPQPPSFTYAQQKEKPLVQEKQHPQPPPAQNQNQVRSPGGPGPLTLKEVEELEQLTQQLMQDMEHPQRQSVAVNESCGKCNQPLARAQPAVRALGQLFHITCFTCHQCQQQLQGQQFYSLEGAPYCEGCYTDTLEKCNTCGQPITDRMLRATGKAYHPQCFTCVVCACPLEGTSFIVDQANQPHCVPDYHKQYAPRCSVCSEPIMPE

SEQ ID NO: 137 - protein, 382 aa, Homo sapiens
MFADLDYDIEEDKLGIPTVPGKVTLQKDAQNLIGISIGGGAQYCPCLYIVQVFDNTPAALDGTVAAGDEITGVNGKSIKGKTKVEVAKMIQEVKGEVTIHYNKLQADPKQGMSLDIVLKKVKHRLVENMSSGTADALGLSRAILCNDGLVKRLEELERTAELYKGMTEHTKNLLRAFYELSQTNRAFGDVFSVIGVREPQPAASEAFVKFADAHRSIEKLGIRLLKTIKPMLTDLNTYLNKAIPDTRLTIKKYLDVKFEYLSYCLKVKEMDDEEYSCIALGEPLYRVSTGNYEYRLILRCRQEARARFSQMRKDVLEKMELLDQKHVQDIVFQLQRFVSTMSKYYNDCYAVLRDADVFPIEVDLAHTTLAYGPNQGSFTDGE

SEQ ID NO: 138 - protein, 330 aa, Homo sapiens
TYTCLAENAMGQVSCSATVTVQEKKGEGERKHRLSPARSKPIAPIFLQGLSDLKVMDGSQVTMTVQVSGNPPPEVIWLHDGNEIQESEDFHFEQKGGWHSLCIQEVFPEDTGTYTCEAWNSAGEVRTRAVLTVQEPHDGTQPWFISKPRSVTATLGQSVLISCAIAGDPFSTGHWLRDGRALSKDSGHFELLQNEDVFTLVLKNVQPWHAGQYEILLKNRVGECSCQVSLMLHNSPSRAPPRGREPASCEGLCGGGGVGAHGDGDRHGTLRPCWPARGQGWPEEEDGEDVRGLLKRRVETRLHTEEAIRQQEVGQLDFRDLLGEKVSTKT

SEQ ID NO: 139 - protein, 628 aa, Mus musculus
MTSPEGAQNKEIDCLSPEAQRLAEARLAAKRAARAEAREIRMKELERQQKEIYQVQKKYYGLDTKWGDIEQWMEDSERYSRRFRRNTSASDEDERLSVGSRGSLRTNGYDGDYCGSQSLSRRSGRGLSCSNLGLPSSGLASKPLSTQNGSRASMLDESSLYGARRGSACGSRAPSEYGSHLNSSSRASSRASSARASPVVEERPDKDFAEKGSRNMPSLSAATLASLGGTSSRRGSGDTSISMDTEASIREIKELNELKDQIQDVEGKYMQGLKEMKDSLAEVEEKYKKAMVSNAQLDNEKTNFMYQVDTLKDMLLELEEQLAESQRQYEEKNKEFEREKHAHSILQFQFAEVKEALRQREEMLEEIRQLQQKQAGFIREISDLQETIEWKDKKIGALERQKEFFDSIRSERDDLREETVKLKEELKKHGIILNSEIATNGETSDTVNDVGYQAPTKITKEELNALKSAGEGTLDVRLKKLIDERECLLEQIKKLKGQLEGRQKNNKLDLLRAEDGILENGTDAHVMDLQRDANRQISDLKFKLAKSEQEITALEQNVIRLESQVTRYRSAAENAEKIEDELKAEKRKLQRELRSALDKTEELEVSNGHLVKRLEKMKANRSALLSQQ

SEQ ID NO: 140 - protein, 2274 aa, Mus musculus
MTSSMASYEQLVRQVEALKAENTHLRQELRDNSSHLSKLETETSGMKEVLKHLQGKLEQEARVLVSSGQTEVLEQLKALQTDISSLYNLKFHAPALGPEPAARTPEGSPVHGSGPSKDSFGELSRATIRLLEELDQERCFLLSEIEKEEKEKLWYYSQLQGLSKRLDELPHVDTFSMQMDLIRQQLEFEAQHIRSLMEERFGTSDEMVQRAQIRASRLEQIDKELLEAQDRVQQTEPQALLAVKPVAVEEEQEAEVPTHPEDGTPQPGNSKVEVVFWLLSMLATRDQEDTARTLLAMSSSPESCVAMRRSGCLPLLLQILHGTEAGSVGRAGIPGAPGAKDARMRANAALHNIVFSQPDQGLARKEMRVLHVLEQIRAYCETCWDWLQARDSGTETPVPIEPQICQATCAVMKLSFDEEYRRAMNELGGLQAVAELLQVDYEMHKMTRDPLNLALRRYAGMTLTNLTFGDVANKATLCARRGCMEAIVAQLGSESEELHQVVSSILRNLSWRADINSKKVLREVGSMTALMECVLRASKESTLKSVLSALWNLSAHSTENKAAICQVDGALGFLVSTLTYRCQGNSLAVIESGGGILRNVSSLIATREDYRQVLRDHNCLQTLLQHLTSHSLTIVSNACGTLWNLSARSPRDQELLWDLGAVGMLRNLVHSKHKMIAMGSAAALRNLLAHRPAKYQAAAMAVSPGTCVPSLYVRKQRALEAELDTRHLVHALGHLEKQSLPEAETTSKKPLPPLRHLDGLVQDYASDSGCFDDDDAPSLAAAATTAEPASPAVMSMFLGGPFLQGQALARTPPARQGGLEAEKEAGGEAAVAAKAKAKLALAVARIDRLVEDISALHTSSDDSFSLSSGDPGQEAPREGRAQSCSPCRGTEGGRREAGSRAHPLLRLKAAHTSLSNDSLNSGSTSDGYCTREHMTPCPLAALAEHRDDPVRGQTRPRRLDLDLPSRAELPARDTAATDARVRTIKLSPTYQHVPLLDGAAGAGVRPLVGPGTSPGARKQAWIPADSLSKVPEKLVASPLPIASKVLQKLVAQDGPMSLSRCSSLSSLSSTGHAVPSQAENLDSDSSLEGLEEAGPGEAELGRAWRASGSTSLPVSIPAPQRGRSRGLGVEDATPSSSSENCVQETPLVLSRCSSVSSLGSFESRSIASSIPSDPCSGLGSGTVSPSELPDSPGQTMPPSRSKTPPAPPGQPETSQFSLQWESYVKRFLDIADCRERCQPPSELDAGSVRFTVEKPDENFSCASSLSALALHELYVQQDVELRLRPPACPERAVGGGGHRRRDEAASRLDGPAPAGSRARSATDKELEALRECLGAAMPARLRKVASALVPGRRSLPVPVYMLVPAPARGDDSGTDSAEGTPVNFSSAASLSDETLQGPSRDKPAGPGDRQKPTGRAAPARQTRSHRPKAAGAGKSTEHTRGPCRNRAGLELPLSRPQSARSNRDSSCQTRTRGDGALQSLCLTTPTEEAVYCFYDSDEEPPATAPPPRRASAIPRALKREKPAGRKETPSRAAQPATLPVRAQPRLIVDETPPCYSLTSSASSLSEPEAPEQPANHARGPEQGSKQDSSPSPRAEEELLQRCISLAMPRRRTQVPGSRRRKPRALRSDIRPTEITQKCQEEVAGSDPASDLDSVEWQAIQEGANSIVTWLHQAAAKASLEASSESDSLLSLVSGVSAGSTLQPSKLRKGRKPAAEAGGAWRPEKRGTTSTKINGSPRLPNGPEKAKGTQKMMAGESTMLRGRTVIYSAGPASRTQSKGISGPCTTPKKTGTSGTTQPETVTKAPSPEQQRSRSLHRPGKISELAALRHPPRSATPPARLAKTPSSSSSQTSPASQPLPRRSPLATPTGGPLPGPGGSLVPKSPARALLAKQHKTQKSPVRIPFMQRPARRVPPPLARPSPEPGSRGRAGAEGTPGARGSRLGLVRMASARSSGSESSDRSGFRRQLTFIKESPGLLRRRRSELSSADSTASTSQAASPRRGRPALPAVFLCSSRCDELRVSPRQPLAAQRSPQAKPGLAPLAPRRTSSESPSRLPVRASPGRPETVKRYASLPHISVSRRSDSAVSVPTTQANATRRGSDGEARPLPRVAPPGTTWRRIKDEDVPHILRSTLPATALPLRVSSPEDSPAGTPQRKTSDAVVQTEDVATSKTNSSTSPSLESRDPPQAPASGPVAPQGSDVDGPVLTKPPASAPFPHEGLSAVIAGFPTSRHGSPSRAARVPPFNYVPSPMAAATMASDSAVEKAPVSSPASLLE

SEQ ID NO: 141 - protein, 1047 aa, Mus musculus
MQKPSGLKPPGRGGKHSSPVGRPSVGSASSSVVASTSGSKEGSPLHKQASGPSSSGAAATVSEKPGPKAAEVGDDFLGHFVVGERVWVNGVKPGVVQYLGETQFAPGQWAGVVLDDPVGKNDGAVGAVRYFECPALQGIFTRPSKLTRQPTAEGSGSDTHSVESLTAQNLSLHSGTATPPLTGRVIPLRESVLNSSVKTGNESGSNLSDSGSVKRGDKDLHLGDRVLVGGTKTGVVRYVGETDFAKGEWCGVELDEPLGKNDGAVAGTRYFQCPPKFGLFAPIHKVIRIGFPSTSPAKAKKTKRMAMGVSALTHSPSSSSISSVSSVASSVGGPASRSGLLTETSSRYARKISGTIALQEALKEKQQHIEQLLAERDLERAEVAKATSHICEVEKEIALLKAQHEQYVAEAEEKLQRARLLVENVRKEKVDLSNQLEEERRKVEDLQFRVEEESITKGDLETQTQLEHARIGELEQSLLLEKAQAERLLRELADNRLTTVAEKSRVLQLEEELSLRRGEIEELQHCLLQSGPPPADHPEAAETLRLRERLLSASKEHQDDSTLLQDKYEHMLKTYQTEVDKLRAANEKYAQEVADLKAKVQQATTENMGLMDNWKSKLDSLASDHQKSLEDLKATLNSGPGAQQKEIGELKALVEGIKMEHQLELGNLQAKHDLETAMHGKEKEGLRQKLQEVQEELAGLQQHWREQLEEQASQHRLELQEAQDQCRDAQLRVQELEGLDVEYRGQAQAIEFLKEQISLAEKKMLDYEMLQRAEAQSRQEAERLREKLLVAENRLQAAESLCSAQHSHVIESSDLSEETIRMKETVEGLQDKLNKRDKEVTALTSQMDMLRAQVSVLENKCKSGEKKIDSLLKEKRRLEAELEAVSRKTHDASGQLVHISQELLRKERSLNELRVLLLEANRHSPGPERDLSREVHKAEWRIKEQKLKDDIRGLREKLTGLDKEKSLSEQRRYSLIDPASPPELLKLQHQLVSTEDALRDALNQAQQVERLVEALRGCSDRTQTISNSGSANGIHQPDKAHKQEDKH

SEQ ID NO: 142 - protein, 900 aa, Mus musculus
MMMVMQPEGLGAGEGPFSGGGGGEYMEQEEDWDRDLLLDPAWEKQQRKTFTAWCNSHLRKAGTQIENIEEDFRNGLKLMLLLEVISGERLPRPDKGKMRFHKIANVNKALDFIASKGVKLVSIGAEEIVDGNLKMTLGMIWTIILRFAIQDISVEETSAKEGLLLWCQRKTAPYRNVNVQNFHTSWKDGLALCALIHRHRPDLIDYAKLRKDDPIGNLNTAFEVAEKYLDIPKMLDAEDIVNTPKPDEKAIMTYVSCFYHAFAGAEQAETAANRICKVLAVNQENEKLMEEYEKLASELLEWIRRTVPWLENRVGEPSMSAMQRKLEDFRDYRRLHKPPRVQEKCQLEINFNTLQTKLRLSHRPAFMPSEGKLVSDIANAWRGLEQVEKGYEDWLLSEIRRLQRLQHLAEKFQQKASLHEAWTRGKEEMLNQHDYESASLQEVRALLRRHEAFESDLAAHQDRVEHIAALAQELNELDYHEAASVNSRCQAICDQWDNLGTLTQKRRDALERMEKLLETIDQLQLEFARRAAPFNNWLDGAIEDLQDVWLVHSVEETQSLLTAHEQFKATLPEADRERGAILGIQGEIQKICQTYGLRPKSGNPYITLSSQDINNKWDTVRKLVPSRDQTLQEELARQQVNERLRRQFAAQANAIGPWIQGKVEEVGRLAAGLAGSLEEQMAGLRQQEQNIINYKSNIDRLEGDHQLLQESLVFDNKHTVYSMEHIRVGWEQLLTSIARTINEVENQVLTRDAKGLSQEQLNEFRASFNHFDRKRNGMMEPDDFRACLISMGYDLGEVEFARIMTMVDPNAAGVVTFQAFIDFMTRETAETDTAEQVVASFKILAGDKNYITPEELRRELPAEQAEYCIRRMAPYKGSGAPSGALDYVAFSSALYGESDL

SEQ ID NO: 143 - protein, 352 aa, Mus musculus
MLETLRERLLSVQQDFTSGLKTLSDKSREAKVKGKPRTAPRLPKYSAGLELLSRYEDAWAALHRRAKECADAGELVDSEVVMLSAHWEKKRTSLNELQGQLQQLPALLQDLESLMASLAHLETSFEEVENHLLHLEDLCGQCELERHKQAQAQHLESYKKSKRKELEAFKAELDTEHTQKALEMEHTQQLKLKERQKFFEEAFQQDMEQYLSTGYLQIAERREPMGSMSSMEVNVDVLEQMDLMDISDQEALDVFLNSGGEDNIVMSPGVEMESNPNQNEMSLQIPSPSESASQPPASPSACTDLDTADAPLIQSDEEEVQVDTALVTLHTDRKSTPGVSDDSDQCDSTQDI

SEQ ID NO: 144 - protein, 247 aa, Mus musculus
MVDREQLVQKARLAEQAERYDDMAAAMKNVTELNEPLSNEERNLLSVAYKNVVGARRSSWRVISSIEQKTSADGNEKKIEMVRAYREKIEKELEAVCQDVLSLLDNYLIKNCSETQYESKVFYLKMKGDYYRYLAEVATGEKRATVVESFEKAYSEAHEISKEHMQPTHPIRLGLALNYSVFYYEIQNAPEQACHLAKTAFDDAIAELDTLNEDSYKDSTLIMQLLRDNLTLWTSDQQDDDGGEGNN

SEQ ID NO: 145 - protein, 245 aa, Mus musculus
MDKNELVQKAKLAEQAERYDDMAACMKSVTEQGAELSNEERNLLSVAYKNVVGARRSSWRVVSSIEQKTEGAEKKQQMAREYREKIETELRDICNDVLSLLEKFLIPNASQPESKVFYLKMKGDYYRYLAEVAAGDDKKGIVDQSQQAYQEAFEISKKEMQPTHPIRLGLALNFSVFYYEILNSPEKACSLAKTAFDEAIAELDTLSEESYKDSTLIMQLLRDNLTLWTSDTQGDEAEAGEGGEN

SEQ ID NO: 146 - protein, 245 aa, Homo sapiens
MDKNELVQKAKLAEQAERYDDMAACMKSVTEQGAELSNEERNLLSVAYKNVVGARRSSWRVVSSIEQKTEGAEKKQQMAREYREKIETELRDICNDVLSLLEKFLIPNASQAESKVFYLKMKGDYYRYLAEVAAGDDKKGIVDQSQQAYQEAFEISKKEMQPTHPIRLGLALNFSVFYYEILNSPEKACSLAKTAFDEAIAELDTLSEESYKDSTLIMQLLRDNLTLWTSDTQGDEAEAGEGGEN

SEQ ID NO: 147 - protein, 246 aa, Mus musculus
MTMDKSELVQKAKLAEQAERYDDMAAAMKAVTEQGHELSNEERNLLSVAYKNVVGARRSSWRVISSIEQKTERNEKKQQMGKEYREKIEAELQDICNDVLELLDKYLILNATQAESKVFYLKMKGDYFRYLSEVASGENKQTTVSNSQQAYQEAFEISKKEMQPTHPIRLGLALNFSVFYYEILNSPEKACSLAKTAFDEAIAELDTLNEESYKDSTLIMQLLRDNLTLWTSENQGDEGDAGEGEN

SEQ ID NO: 148 - protein, 245 aa, Mus musculus
MEKTELIQKAKLAEQAERYDDMATCMKAVTEQGAELSNEERNLLSVAYKNVVGGRRSAWRVISSIEQKTDTSDKKLQLIKDYREKVESELRSICTTVLELLDKYLIANATNPESKVFYLKMKGDYFRYLAEVACGDDRKQTIENSQGAYQEAFDISKKEMQPTHPIRLGLALNFSVFYYEILNNPELACTLAKTAFDEAIAELDTLNEDSYKDSTLIMQLLRDNLTLWTSDSAGEECDAAEGAEN

SEQ ID NO: 149 - protein, 245 aa, Homo sapiens
MEKTELIQKAKLAEQAERYDDMATCMKAVTEQGAELSNEERNLLSVAYKNVVGGRRSAWRVISSIEQKTDTSDKKLQLIKDYREKVESELRSICTTVLELLDKYLIANATNPESKVFYLKMKGDYFRYLAEVACGDDRKQTIDNSQGAYQEAFDISKKEMQPTHPIRLGLALNFSVFYYEILNNPELACTLAKTAFDEAIAELDTLNEDSYKDSTLIMQLLRDNLTLWTSDSAGEECDAAEGAEN

SEQ ID NO: 150 - protein, 2154 aa, Mus musculus
MELQRTSSVSGPLSPAYTGQVPYNYNQLEGRFKQLQDEREAVQKKTFTKWVNSHLARVSCRITDLYTDLRDGRMLIKLLEVLSGERLPKPTKGRMRIHCLENVDKALQFLKEQRVHLENMGSHDIVDGNHRLTLGLIWTIILRFQIQDISVETEDNKEKKSAKDALLLWCQMKTAGYPNVNIHNFTTSWRDGMAFNALIHKHRPDLIDFDKLKKSNAHYNLQNAFNLAEQHLGLTKLLDPEDISVDHPDEKSIITYVVTYYHYFSKMKALAVEGKRIGKVLDNAIETEKMIEKYETLASDLLEWIEQTIIILNNRKFANSLVGVQQQLQAFNTYRTVEKPPKFTEKGNLEVLLFAIQSKMRANNQKVYMPREGKLISDINKAWERLEKAEHERELALRNELIRQEKLEQLARRFDRKAAMRETWLSENQRLVSQDNFGFDLPAVEAATKKHEAIETDIAAYEERVQAVVAVARELEAENYHDIKRITARKDNVIRLWEYLLELLRARRQRLEMNLGLQKIFQEMLYIMDWMDEMKVLLLSQDYGKHLLGVEDLLQKHALVEADIAIQAERVRGVNASAQKFATDGEGYKPCDPQVIRDRVAHMEFCYQELCQLAAERRARLEESRRLWKFFWEMAEEEGWIREKEKILSSDDYGKDLTSVMRLLSKHRAFEDEMSGRSGHFEQAIKEGEDMIAEEHFGSEKIRERIIYIREQWANLEQLSAIRKKRLEEASLLHQFQADADDIDAWMLDILKIVSSNDVGHDEYSTQSLVKKHKDVAEEITNCRPTIDTLHEQASALPQAHAESPDVKGRLAGIEERCKEMAELTRLRKQALQDTLALYKMFSEADACELWIDEKEQWLNNMQIPEKLEDLEVIQHRFESLEPEMNNQASRVAVVNQIARQLMHNGHPSEKEIRAQQDKLNTRWSQFRELVDRKKDALLSALSIQNYHLECNETKSCIREKTKVIESTQDLGNDLAGVMALQCKLTGMERDLVAIEAKLSDLQKEAEKLESEHPDQAQAILSRLAEISDVWEEMKTTLKNREASLGEASKLQQFLRDLDDFQSWLSRTQTAIASEDMPNTLTEAEKLLTQHENIKNEIDNYEEDYQKMRDMGEMVTQGQTDAQYMFLRQRLQALDTGWNELHKMWENRQNLLSQSHAYQQFLRDTKQAEAFLNNQEYVLAHTEMPTTLEGAEAAIKKQEDFMTTMDANEEKINAVVETGRRLVSDGNINSDRIQEKVDSIDDRHRKNREAASELLMRLKDNRDLQKFLQDCQELSLWINEKMLTAQDMSYDEARNLHSKWLKHQAFMAELASNKEWLDKIEKEGMQLISEKPETEAVVKEKLTGLHKMWEVLESTTQTKAQRLFDANKAELFTQSCADLDKWLHGLESQIQSDDYGKDLTSVNILLKKQQMLENQMEVRKKEIEELQSQAQALSQEGKSTDEVDSKRLTVQTKFMELLEPLSERKHNLLASKEIHQFNRDVEDEILWVGERMPLATSTDHGHNLQTVQLLIKKNQTLQKEIQGHQPRIDDIFERSQNIITDSSSLNAEAIRQRLADLKQLWGLLIEETEKRHRRLEEAHKAQQYYFDAAEAEAWMSEQELYMMSEEKAKDEQSAVSMLKKHQILEQAVEDYAETVHQLSKTSRALVADSHPESERISMRQSKVDKLYAGLKDLAEERRGKLDERHRLFQLNREVDDLEQWIAEREVVAGSHELGQDYEHVTMLQERFREFARDTGNIGQERVDTVNNMADELINSGHSDAATIAEWKDGLNEAWADLLELIDTRTQILAASYELHKFYHDAKEIFGRIQDKHKKLPEELGRDQNTVETLQRMHTTFEHDIQALGTQVRQLQEDAARLQAAYAGDKADDIQKRENEVLEAWKSLLDACEGRRVRLVDTGDKFRFFSMVRDLMLWMEDVIRQIEAQEKPRDVSSVELLMNNHQGIKAEIDARNDSFTACIELGKSLLARKHYASEEIKEKLLQLTEKRKEMIDKWEDRWEWLRLILEVHQFSRDASVAEAWLLGQEPYLSSREIGQSVDEVEKLIKRHEAFEKSAATWDERFSALERLTTLELLEVRRQQEEEERKRRPPSPDPNTKVSEEAESQQWDTSKGDQVSQNGLPAEQGSPRVSYRSQTYQNYKNFNSRRTASDHSWSGM

SEQ ID NO: 151 - protein, 5430 aa, Homo sapiens
MSSSDEETLSERSCRSERSCRSERSYRSERSGSLSPCPPGDTLPWNLPLHEQKKRKSQDSVLDPAERAVVRVADERDRVQKKTFTKWVNKHLMKVRKHINDLYEDLRDGHNLISLLEVLSGIKLPREKGRMRFHRLQNVQIALDFLKQRQVKLVNIRNDDITDGNPKLTLGLIWTIILHFQISDIYISGESGDMSAKEKLLLWTQKVTAGYTGIKCTNFSSCWSDGKMFNALIHRYRPDLVDMERVQIQSNRENLEQAFEVAERLGVTRLLDAEDVDVPSPDEKSVITYVSSIYDAFPKVPEGGEGISATEVDSRWQEYQSRVDSLIPWIKQHTILMSDKTFPQNPVELKALYNQYIHFKETEILAKEREKGRIEELYKLLEVWIEFGRIKLPQGYHPNDVEEEWGKLIIEMLEREKSLRPAVERLELLLQIANKIQNGALNCEEKLTLAKNTLQADAAHLESGQPVQCESDVIMYIQECEGLIRQLQVDLQILRDENYYQLEELAFRVMRLQDELVTLRLECTNLYRKGHFTSLELVPPSTLTTTHLKAEPLTKATHSSSTSWFRKPMTRAELGPSAPLKMKAISDLCMNYCLWVEEMQMKLERAEWGNDLPSVELQLETQQHIHTSVEELGSSVKEARLYEGKMSQNFHTSYAETLGKLETQYCKLKETSSFRMRHLQSLHKFVSRATAELIWLNEKEEEELAYDWSDNNSNISAKRNYFSELTMELEEKQDVFRSLQDTAELLSLENHPAKQTVEAYSAAVQSQLQWMKQLCLCVEQHVKENTAYFQFFSDARELESFLRNLQDSIKRKYSCDHNTSLSRLEDLLQDSMDEKEQLIQSKSSVASLVGRSKTIVQLKPRSPDHVLKNTISVKAVCDYRQIEITICKNDECVLEDNSQRTKWKVISPTGNEAMVPSVCFLIPPPNKDAIEMASRVEQSYQKVMALWHQLHVNTKSLISWNYLRKDLDLVQTWNLEKLRSSAPGECHQIMKNLQAHYEDFLQDSRDSVLFSVADRLRLEEEVEACKARFQHLMKSMENEDKEETVAKMYISELKNIRLRLEEYEQRVVKRIQSLASSRTDRDAWQDNALRIAEQEHTQEDLQQLRSDLDAVSMKCDSFLHQSPSSSSVPTLRSELNLLVEKMDHVYGLSTVYLNKLKTVDVIVRSIQDAELLVKGYEIKLSQEEVVLADLSALEAHWSTLRHWLSDVKDKNSVFSVLDEEIAKAKVVAEQMSRLTPERNLDLERYQEKGSQLQERWHRVIAQLEIRQSELESIQEVLGDYRACHGTLIKWIEETTAQQEMMKPGQAEDSRVLSEQLSQQTALFAEIERNQTKLDQCQKFSQQYSTIVKDYELQLMTYKAFVESQQKSPGKRRRMLSSSDAITQEFMDLRTRYTALVTLTTQHVKYISDALRRLEEEEKVVEEEKQEHVEKVKELLGWVSTLARNTQGKATSSETKESTDIEKAILEQQVLSEELTTKKEQVSEAIKASQIFLAKHGHKLSEKEKKQISEQLNALNKAYHDLCDGSANQLQQLQSQLAHQTEQKTLQKQQNTCHQQLEDLCSWVGQAERALAGHQGRTTQQDLSALQKNQSDLKDLQDDIQNRATSFATVVKDIEGFMEENQTKLSPRELTALREKLHQAKEQYEALQEETRVAQKELEEAVTSALQQETEKSKAAKELAENKKKIDALLDWVTSVGSSGGQLLTNLPGMEQLSGASLEKGALDTTDGYMGVNQAPEKLDKQCEMMKARHQELLSQQQNFILATQSAQAFLDQHGHNLTPEEQQMLQQKLGELKEQYSTSLAQSEAELKQVQTLQDELQKFLQDHKEFESWLERSEKELENMHKGGSSPETLPSLLKRQGSFSEDVISHKGDLRFVTISGQKVLDMENSFKEGKEPSEIGNLVKDKLKDATERYTALHSKCTRLGSHLNMLLGQYHQFQNSADSLQAWMQACEANVEKLLSDTAASDPGVLQEQLATTKQLQEELAEHQVPVEKLQKVARDIMEIEGEPAPDHRHVQETTDSILSHFQSLSYSLAERSSLLQKAIAQSQSVQDSLESLLQSIGEVEQNLEGKQVSSLSSGVIQEALATNMKLKQDIARQKSSLEATREMVTRFMETADSTTAAVLQGKLAEVSQRFEQLCLQQQEKESSLKKLLPQAEMFEHLSGKLQQFMENKSRMLASGNQPDQDITHFFQQIQELNLEMEDQQENLDTLEHLVTELSSCGFALDLCQHQDRVQNLRKDFTELQKTVKEREKDASSCQEQLDEFRKLVRTFQKWLKETEGSIPPTETSMSAKELEKQIEHLKSLLDDWASKGTLVEEINYKGTSLENLIMEITAPDSQGKTGSILPSVGSSVGSVNGYHTCKDLTEIQCDMSDVNLKYEKLGGVLHERQESLQAILNRMEEVHKEANSVLQWLESKEEVLKSMDAMSSPTKTETVKAQAESNKAFLAELEQNSPKIQKVKEALAGLLVTYPNSQEAENWKKIQEELNSRWERATEVTVARQRQLEESASHLACFQAAESQLQPWLMEKELMMGVLGPLSIDPNMLNAQKQQVQFMLKEFEARRQQHEQLNEAAQGILTGPGDVSLSTSQVQKELQSINQKWVELTDKLNSRSSQIDQAIVKSTQYQELLQDLSEKVRAVGQRLSVQSAISTQPEAVKQQLEETSEIRSDLEQLDHEVKEAQTLCDELSVLIGEQYLKDELKKRLETVALPLQGLEDLAADRINRLQAALASTQQFQQMFDELRTWLDDKQSQQAKNCPISAKLERLQSQLQENEEFQKSLNQHSGSYEVIVAEGESLLLSVPPGEEKRTLQNQLVELKNHWEELSKKTADRQSRLKDCMQKAQKYQWHVEDLVPWIEDCKAKMSELRVTLDPVQLESSLLRSKAMLNEVEKRRSLLEILNSAADILINSSEADEDGIRDEKAGINQNMDAVTEELQAKTGSLEEMTQRLREFQESFKNIEKKVEGAKHQLEIFDALGSQACSNKNLEKLRAQQEVLQALEPQVDYLRNFTQGLVEDAPDGSDASQLLHQAEVAQQEFLEVKQRVNSGCVMMENKLEGIGQFHCRVREMFSQLADLDDELDGMGAIGRDTDSLQSQIEDVRLFLNKIHVLKLDIEASEAECRHMLEEEGTLDLLGLKRELEALNKQCGKLTERGKARQEQLELTLGRVEDFYRKLKGLNDATTAAEEAEALQWVVGTEVEIINQQLADFKMFQKEQVDPLQMKLQQVNGLGQGLIQSAGKDCDVQGLEHDMEEINARWNTLNKKVAQRIAQLQEALLHCGKFQDALEPLLSWLADTEELIANQKPPSAEYKVVKAQIQEQKLLQRLLDDRKATVDMLQAEGGRIAQSAELADREKITGQLESLESRWTELLSKAAARQKQLEDILVLAKQFHETAEPISDFLSVTEKKLANSEPVGTQTAKIQQQIIRHKALEEDIENHATDVHQAVKIGQSLSSLTSPAEQGVLSEKIDSLQARYSEIQDRCCRKAALLDQALSNARLFGEDEVEVLNWLAEVEDKLSSVFVKDFKQDVLHRQHADHLALNEEIVNRKKNVDQAIKNGQALLKQTTGEEVLLIQEKLDGIKTRYADITVTSSKALRTLEQARQLATKFQSTYEELTGWLREVEEELATSGGQSPTGEQIPQFQQRQKELKKEVMEHRLVLDTVNEVSRALLELVPWRAREGLDKLVSDANEQYKLVSDTIGQRVDEIDAAIQRSQQYEQAADAELAWVAETKRKLMALGPIRLEQDQTTAQLQVQKAFSIDIIRHKDSMDELFSHRSEIFGTCGEEQKTVLQEKTESLIQQYEAISLLNSERYARLERAQVLVNQFWETYEELSPWIEETRALIAQLPSPAIDHEQLRQQQEEMRQLRESIAEHKPHIDKLLKIGPQLKELNPEEGEMVEEKYQKAENMYAQIKEEVRQRALALDEAVSQSTQITEFHDKIEPMLETLENLSSRLRMPPLIPAEVDKIRECISDNKSATVELEKLQPSFEALKRRGEELIGRSQGADKDLAAKEIQDKLDQMVFFWEDIKARAEEREIKFLDVLELAEKFWYDMAALLTTIKDTQDIVHDLESPGIDPSIIKQQVEAAETIKEETDGLHEELEFIRILGADLIFACGETEKPEVRKSIDEMNNAWENLNKTWKERLEKLEDAMQAAVQYQDTLQAMFDWLDNTVIKLCTMPPVGTDLNTVKDQLNEMKEFKVEVYQQQIEMEKLNHQGELMLKKATDETDRDIIREPLTELKHLWENLGEKIAHRQHKLEGALLALGQFQHALEELMSWLTHTEELLDAQRPISGDPKVIEVELAKHHVLKNDVLAHQATVETVNKAGNELLESSAGDDASSLRSRLEAMNQCWESVLQKTEEREQQLQSTLQQAQGFHSEIEDFLLELTRMESQLSASKPTGGLPETAREQLDTHMELYSQLKAKEETYNQLLDKGRLMLLSRDDSGSGSKTEQSVALLEQKWHVVSSKMEERKSKLEEALNLATEFQNSLQEFINWLTLAEQSLNIASPPSLILNTVLSQIEEHKVFANEVNAHRDQIIELDQTGNQLKFLSQKQDVVLIKNLLVSVQSRWEKVVQRSIERGRSLDDARKRAKQFHEAWKKLIDWLEDAESHLDSELEISNDPDKIKLQLSKHKEFQKTLGGKQPVYDTTIRTGRALKEKTLLPEDTQKLDNFLGEVRDKWDTVCGKSVERQHKLEEALLFSGQFMDALQALVDWLYKVEPQLAEDQPVHGDLDLVMNLMDAHKVFQKELGKRTGTVQVLKRSGRELIENSRDDTTWVKGQLQELSTRWDTVCKLSVSKQSRLEQALKQAEVFRDTVHMLLEWLSEAEQTLRFRGALPDDTEALQSLIDTHKEFMKKVEEKRVDVNSAVAMGEVILAVCHPDCITTIKHWITIIRARFEEVLTWAKQHQQRLETALSELVANAELLEELLAWIQWAETTLIQRDQEPIPQNIDRVKALIAEHQTFMEEMTRKQPDVDRVTKTYKRKNIEPTHAPFIEKSRSGGRKSLSQPTPPPMPILSQSEAKNPRINQLSARWQQVWLLALERQRKLNDALDRLEELKEFANFDFDVWRKKYMRWMNHKKSRVMDFFRRIDKDQDGKITRQEFIDGILASKFPTTKLEMTAVADIFDRDGDGYIDYYEFVAALHPNKDAYRPTTDADKIEDEVTRQVAQCKCAKRFQVEQIGENKYRFGDSQQLRLVRILRSTVMVRVGGGWMALDEFLVKNDPCRARGRTNIELREKFILPEGASQGMTPFRSRGRRSKPSSRAASPTRSSSSASQSNHSCTSMPSSPATPASGTKVIPSSGSKLKRPTPTFHSSRTSLAGDTSNSSSPASTGAKTNRADPKKSASRPGSRAGSRAGSRASSRRGSDASDFDLLETQSACSDTSESSAAGGQGNSRRGLNKPSKIPTMSKKTTTASPRTPGPKR

SEQ ID NO: 152 - protein, 1939 aa, Homo sapiens
MSSDSEMAIFGEAAPFLRKSERERIEAQNKPFDAKTSVFVVDPKESFVKATVQSREGGKVTAKTEAGATVTVKDDQVFPMNPPKYDKIEDMAMMTHLHEPAVLYNLKERYAAWMIYTYSGLFCVTVNPYKWLPVYNAEVVTAYRGKKRQEAPPHIFSISDNAYQFMLTDRENQSILITGESGAGKTVNTKRVIQYFATIAVTGEKKKEEVTSGKMQGTLEDQIISANPLLEAFGNAKTVRNDNSSRFGKFIRIHFGTTGKLASADIETYLLEKSRVTFQLKAERSYHIFYQIMSNKKPDLIEMLLITTNPYDYAFVSQGEITVPSIDDQEELMATDSAIEILGFTSDERVSIYKLTGAVMHYGNMKFKQKQREEQAEPDGTEVADKAAYLQNLNSADLLKALCYPRVKVGNEYVTKGQTVQQVYNAVGALAKAVYDKMFLWMVTRINQQLDTKQPRQYFIGVLDIAGFEIFDFNSLEQLCINFTNEKLQQFFNHHMFVLEQEEYKKEGIEWTFIDFGMDLAACIELIEKPMGIFSILEEECMFPKATDTSFKNKLYEQHLGKSNNFQKPKPAKGKPEAHFSLIHYAGTVDYNIAGWLDKNKDPLNETVVGLYQKSAMKTLALLFVGATGAEAEAGGGKKGGKKKGSSFQTVSALFRENLNKLMTNLRSTHPHFVRCIIPNETKTPGAMEHELVLHQLRCNGVLEGIRICRKGFPSRILYADFKQRYKVLNASAIPEGQFIDSKKASEKLLGSIDIDHTQYKFGHTKVFFKAGLLGLLEEMRDEKLAQLITRTQAMCRGFLARVEYQKMVERRESIFCIQYNVRAFMNVKHWPWMKLYFKIKPLLKSAETEKEMANMKEEFEKTKEELAKTEAKRKELEEKMVTLMQEKNDLQLQVQAEADSLADAEERCDQLIKTKIQLEAKIKEVTERAEDEEEINAELTAKKRKLEDECSELKKDIDDLELTLAKVEKEKHATENKVKNLTEEMAGLDETIAKLTKEKKALQEAHQQTLDDLQAEEDKVNTLTKAKIKLEQQVDDLEGSLEQEKKIRMDLERAKRKLEGDLKLAQESAMDIENDKQQLDEKLKKKEFEMSGLQSKIEDEQALGMQLQKKIKELQARIEELEEEIEAERASRAKAEKQRSDLSRELEEISERLEEAGGATSAQIEMNKKREAEFQKMRRDLEEATLQHEATAATLRKKHADSVAELGEQIDNLQRVKQKLEKEKSEMKMEIDDLASNMETVSKAKGNLEKMCRALEDQLSEIKTKEEEQQRLINDLTAQRARLQTESGEYSRQLDEKDTLVSQLSRGKQAFTQQIEELKRQLEEEIKAKSALAHALQSSRHDCDLLREQYEEEQEAKAELQRAMSKANSEVAQWRTKYETDAIQRTEELEEAKKKLAQRLQDAEEHVEAVNAKCASLEKTKQRLQNEVEDLMIDVERTNAACAALDKKQRNFDKILAEWKQKCEETHAELEASQKESRSLSTELFKIKNAYEESLDQLETLKRENKNLQQEISDLTEQIAEGGKRIHELEKIKKQVEQEKSELQAALEEAEASLEHEEGKILRIQLELNQVKSEVDRKIAEKDEEIDQMKRNHIRIVESMQSTLDAEIRSRNDAIRLKKKMEGDLNEMEIQLNHANRMAAEALRNYRNTQAILKDTQLHLDDALRSQEDLKEQLAMVERRANLLQAEIEELRATLEQTERSRKIAEQELLDASERVQLLHTQNTSLINTKKKLETDISQIQGEMEDIIQEARNAEEKAKKAITDAAMMAEELKKEQDTSAHLERMKKNLEQTVKDLQHRLDEAEQLALKGGKKQIQKLEARVRELEGEVESEQKRNVEAVKGLRKHERKVKELTYQTEEDRKNILRLQDLVDKLQAKVKSYKRQAEEAEEQSNVNLSKFRRIQHELEEAEERADIAESQVNKLRVKSREVHTKIISEE

SEQ ID NO: 153 - protein, 474 aa, Mus musculus
MPGTALSPLLLLLLLSWASRNEAAPDQDEIDCLPGLAKQPSFRQYSGYLRASDSKHFHYWFVESQNDPKNSPVVLWLNGGPGCSSLDGLLTEHGPFLIQPDGVTLEYNPYAWNLIANVLYIESPAGVGFSYSDDKMYVTNDTEVAENNYEALKDFFRLFPEYKDNKLFLTGESYAGIYIPTLAVLVMQDPSMNLQGLAVGNGLASYEQNDNSLVYFAYYHGLLGNRLWTSLQTHCCAQNKCNFYDNKDPECVNNLLEVSRIVGKSGLNIYNLYAPCAGGVPGRHRYEDTLVVQDFGNIFTRLPLKRRFPEALMRSGDKVRLDPPCTNTTAPSNYLNNPYVRKALHIPESLPRWDMCNFLVNLQYRRLYQSMNSQYLKLLSSQKYQILLYNGDVDMACNFMGDEWFVDSLNQKMEVQRRPWLVDYGESGEQVAGFVKECSHITFLTIKGAGHMVPTDKPRAAFTMFSRFLNKEPY

SEQ ID NO: 154 - protein, 564 aa, Mus musculus
MAAPRPPPAISVSVSAPAFYAPQKKFAPVVAPKPKVNPFRPGDSEPPVAAGAQRAQMGRVGEIPPPPPEDFPLPPPPLIGEGDDSEGALGGAFPPPPPPMIEEPFPPAPLEEDIFPSPPPPLEEEGGPEAPTQLPPQPREKVCSIDLEIDSLSSLLDDMTKNDPFKARVSSGYVPPPVATPFVPKPSTKPAPGGTAPLPPWKTPSSSQPPPQPQAKPQVQLHVQPQAKPHVQPQPVSSANTQPRGPLSQAPTPAPKFAPVAPKFTPVVSKFSPGAPSGPGPQPNQKMVPPDAPSSVSTGSPQPPSFTYAQQKEKPLVQEKQHPQPPPAQNQNQVRSPGGPGPLTLKEVEELEQLTQQLMQDMEHPQRQSVAVNESCGKCNQPLARAQPAVRALGQLFHITCFTCHQCQQQLQGQQFYSLEGAPYCEGCYTDTLEKCNTCGQPITDRMLRATGKAYHPQCFTCVVCACPLEGTSFIVDQANQPHCVPDYHKQYAPRCSVCSEPIMPEPGRDETVRVVALDKNFHMKCYKCEDCGKPLSIEADDNGCFPLDGHVLCRKCHSARAQT

SEQ ID NO: 155 - protein, 416 aa, Mus musculus
MFADLDYDIEEDKLGIPTVPGKVTLQKDAQNLIGISIGGGAQYCPCLYIVQVFDNTPAALDGTVAAGDEITGVNGKSIKGKTKVEVAKMIQEVKGEVTIHYNKLQADPKQGMSLDIVLKKVKHRLVENMSSGTADALGLSRAILCNDGLVKRLEELERTAELYKGMTEHTKNLLRAFYELSQTHRAFGDVFSVIGVREPQPAASEAFVKFADAHRSIEKFGIRLLKTIKPMLTDLNTYLNKAIPDTRLTIKKYLDVKFEYLSYCLKVKEMDDEEYSCIALGEPLYRVSTGNYEYRLILRCRQEARARFSQMRKDVLEKMELLDQKHVQDIVFQLQRFVSTMSKYYNDCYAVLQDADVFPIEVDLAHTTLAYGPNQGSFTDGEEEDEEEEDGAAREVSKDACGATGPTDKGGSWCDS

SEQ ID NO: 156 - protein, 1561 aa, Mus musculus
MGDVKLFASSHMSKTSHSVDPSKVSSMPLTEAPAFILPPRNLCVKEGATAKFEGRVRGYPEPQVTWHRKGQAITNGGRFLLDCGVRGTFSLVIHTVREEDKGKYTCEASNGSGARQVTVELTVEGNSMKKRDQPVLSKASGFPGETRPSIWGECPPKFATKLGRAVVKEGQMGRFSCKITGRPPPQVTWLKGNVPLQPSARVSMSEKNGMQILEIRGVTRDDLGVYTCMVVNGSGKASMSAELSIPGLDNAARLAVRGTKAPSPDIRKEVTNGVSKDPETVAESKNCPSPQRSGSSARATNSHLKSPQEPKPKLCEDAPRKVPQSSILQKSTSTITLQALKVQPEARVPAIGSFSPGEDRKSLAAPQQATLPTRQSSLGGSVGNKFVTGNIPRESQRESTFPRFESQPQSQEVTEGQTVKFICEVSGIPKPDVGWFLEGIPVRRREGITEVYEDGVSHHLCLLRARTRDSGRYSCTASNSLGQVSCSWSLLVDRPNLAQTAPSFSSVLKDSVVIEGQDFVLRCSVQGTPAPRVTWLLNGQPIQFAHSICEAGVAELHIQDALPEDRGTYTCLAENAMGQVSCSATVTVQEKKGEGEREHRLSPARSKPIAPIFLQGLSDLKVMDGSQVTMTVQVSGNPPPEVIWLHDGNEIQESEDFHFEQKGGWHSLCIQEVFPEDTGTYTCEAWNSAGEVRTRAVLTVQEPHDGTQPWFISKPRSVTATLGQSVLISCAIAGDPFPTVHWLRDGRALSKDSGHFELLQNEDVFTLVLKNVQPWHAGQYEILLKNRVGECSCQVSLMLHNSPSRAPPRGREPASCEGLCGGGGVGAHGDGDRHGTLRPCWPARGQGWPEEEDGEDVRGLLKRRVETRLHTEEAIRQQEVGQLDFRDLLGKKVSTKTVSEDDLKDIPAEQMDFRANLQRQVKPKTISEEERKVHSPQQVDFRSVLAKKGTPKTPVPEKAPPKAATPDFRSVLGGKKKSPSENGGNSAEVLNVKAGESPTPAGDAQAIGALKPVGNAKPAETPKPIGNAKPTETLKPVGNTKPAETLKPIANAQPSGSLKPVTNAQPAEPQKPVGNAKSAETSKPAGKEEVKEVKNDVNCKKGQVGATGNEKRPESQGSAPVFKEKLQDVHVAEGEKLLLQCQVISDPPATVTWSLNGKTLKTTKFIVLAQEGSRFSVSIEKALPEDRGLYKCVAKNSAGQAECSCQVTVDDAQTSENTKAPEMKSRRPKSSLPPVLGTESDATVKKKPAPKTPTKAAMPPQIIQFPEDQKVRAGEPVELFGKVAGTQPITCKWMKFRKQIQESEHIKVENGESGSKLTILAARQEHCGCYTLVVENKLGSRQAQVNLTVVDKPDPPAGTPCASDIRSSSLTLSWYGSSYDGGSAVQSYNVEIWDTEDKVWKELATCRSTSFNVQDLLPDREYKFRVRAVNVYGTSEPSQESELTAVGEKPEEPKDEVEVSDDDEKEPEVDYRTVTVNTEQKVSDVYDIEERLGSGKFGQVFRLVEKKTGKIWAGKFFKAYSAKEKDNIRQEISIMNCLHHPKLVQCVDAFEEKANIVMVLE

SEQ ID NO: 157 - DNA, 1098 bp, Mus musculus
gacctgaaggccacgctgaactctggcccaggcgcccagcagaaggagatcggagagttgaaggccctggtagagggcatcaagatggagcaccagctggagttaggtaacctgcaggccaagcacgacttggagacggccatgcatgggaaggagaaggagggcctgcggcagaagctgcaagaggtccaggaggagctggccgggctgcagcagcactggagggagcagctggaggagcaggccagccagcatcggctggagctccaagaagcccaggaccaatgtcgcgacgcccagctgcgcgcgcaggagctagagggactggatgtggagtaccgtggccaggctcaagccatcgagttcctcaaagagcagatctcactggctgaaaagaagatgctagattacgagatgctgcagagggccgaagcccagagcaggcaggaggccgagcggctgcgggaaaagcttctggtggctgagaatagactccaggccgccgagtccctgtgctcagcccagcacagccatgtgatcgaatccagtgacctttctgaggagacaattcggatgaaggagactgtagagggcctgcaggacaagctgaacaagagggacaaagaggtgacagccttgacatcccagatggacatgctcagggcccaagtaagtgctctagaaaacaagtgcaaatcaggagagaagaagatagattctctcctgaaggagaagaggcgcctagaggcagagctggaggctgtgtctcggaagacccacgatgcctccggccagctggtccacatcagccaggagttgctgcggaaagagaggagtctgaacgagctgagggtgttgctgttagaagccaatcgccactccccagggcccgagagagacctgagccgtgaagtacacaaagctgaatggcggataaaggaacagaaactgaaggatgacatccggggcctgcgtgagaagctgaccgggctggacaaggagaagtccctatcagagcagagacgctactccctcattgacccagcttcaccacccgagctgctgaaactgcagcatcagttggtgagcacggaagac

SEQ ID NO: 158 - DNA, 591 bp, Mus musculus
gagaaaggaatcaaactgctgcaggcacagaagctggtgcagtatttgcgggagtgtgaggatgtaatggactggatcaatgacaaggaagcaattgtgacttctgaggagctgggccaggacctggagcatgtagaggtgctacagaagaagtttgaagagtttcagactgatctggctgctcatgaagaaagagttaatgaagtgagccagtttgctgccaaactcatccaggagcagcacccggaagaggagctgatcaagaccaagcaggatgaggtgaatgcagcatggcagcgactgaaaggcctggctcttcaaaggcagggcaagctgttcggtgctgctgaggtccagcgctttaacagggatgtagatgagaccattggttggattaaggagaaagagcagttaatggcctctgatgacttcggcagagacttagcaagtgttcaagctctgcttcgaaagcatgagggtctggagagagatcttgctgctctagaggacaaggtgaaagccctgtgtgctgaggctgaccgcctgcaacagtcacaccctctgagtgccagccagatccaggggaagcga

SEQ ID NO: 159 - DNA, 375 bp, Homo sapiens
gacgatgccgccgtggagacagctgaggaagcaaaggagcctgctgaagctgacatcactgagctctgccgggacatgttctccaaaatggccacttacctgactggggaactgacggccaccagtgaagactataagctcctggaaaatatgaataaactcaccagcttgaagtatcttgaaatgaaagatattgctataaacattagtaggaacttaaaggacttaaaccagaaatatgctggactgcagccttatctggatcagatcaatgtcattgaagagcaggtagcagctcttgagcaggcagcttacaagttggatgcatattcaaaaaaactggaagccaagtacaagaagctggagaagcgatga

SEQ ID NO: 160 - protein, 6 aa, Mus musculus
AASAEA

SEQ ID NO: 161 - protein, 6 aa, Artificial Sequence
  Description of Artificial Sequence: 6-His tag
HHHHHH

1-191. (canceled)

192. An isolated protein having a first protein which is FHOS or a homologue or derivative or fragment thereof, interacting with a second protein selected from the group consisting of mRNF23, mERp59, mBRD7(621), mSPNA1, mVCP, mSTAT5A, mTAKEDA009, mPTRF, mAK031693, m1200014P03Rik, mNNP1, mLOC213473(195), mGOLGA3, mMYG1-pending, mAK044679(668), RS21C6, KIAA0562, COPB, MYH7, KIAA1633, KIAA1288(1191), mVCL, mBC028274(908), mBC026864(777), m5730504C04Rik, mMYH9, mp116Rip, TPM3, MYH6, mMBLR, mZFP144, ZNF144(294), 14-3-3epsilon, BF672897(87), mCATNB, mCATNS, mSWAN, m2300003P22Rik(248), mTAKEDA015, PCNT2, KPNA4, MAPKAP1, mTPT1, mAK014397(679), mHRMT1L1, HRMT1L1(241), SAT(204), BC023995(305), TTN, mLRRFIP1, mAPC2, mCYLN2(1047), mACTN3, mDTNBP1, mTAKEDA013, m14-3-3g, m14-3-3zeta, 14-3-3zeta, m14-3-3b, m14-3-3theta, 14-3-3theta, mSPNB2, BC020494(124), MACF1, MYH1, mPPGB, mZYX, mPRKCABP and mMYLK or a homologue or derivative or fragment thereof, wherein the interaction is through a complex or covalent bond, or any other intermolecular interaction.

193. The isolated protein complex of claim 192, wherein said first protein consists of an amino acid sequence set forth in SEQ ID NO: 1, 2, 3, 51, 52, 53, 54, 115, 116, or 117, said second protein consists of an amino acid sequence selected from the group consisting of SEQ ID NOS: 4-26, 55-86, and 118-138.

194. The isolated protein complex of claim 192, wherein said first protein is a hybrid protein containing the complete amino acid sequence of FHOS.

195. The isolated protein complex of claim 192, wherein said second protein is a hybrid protein containing the complete amino acid sequence of a protein selected from the group consisting of mRNF23, mERp59, mBRD7(621), mSPNA1, mVCP, mSTAT5A, mTAKEDA009, mPTRF, mAK031693, m1200014PO3Rik, mNNP1, mLOC213473(195), mGOLGA3, mMYG1-pending, mAK044679(668), RS21C6, KIAA0562, COPB, MYH7, KIAA1633, KIAA1288(1191), mVCL, mBC028274(908), mBC026864(777), m5730504C04Rik, mMYH9, mp116Rip, TPM3, MYH6, mMBLR, mZFP144, ZNF144(294), 14-3-3epsilon, BF672897(87), mCATNB, mCATNS, mSWAN, m2300003P22Rik(248), mTAKEDA015, PCNT2, KPNA4, MAPKAP1, mTPT1, mAK014397(679), mHRMT1L1, HRMT1L1(241), SAT(204), BC023995(305), TTN, mLRRFIP1, mAPC2, mCYLN2(1047), mACTN3, mDTNBP1, mTAKEDA013, m14-3-3g, m14-3-3zeta, 14-3-3zeta, m14-3-3b, m14-3-3theta, 14-3-3theta, mSPNB2, BC020494(124), MACF 1, MYH1, mPPGB, mZYX, mPRKCABP and mMYLK.

196. The isolated protein complex of claim 192, wherein said first protein comprises an amino acid sequence selected from the group consisting of SEQ ID NO: 1, 2, 3, 51, 52, 53, 54, 115, 116, and 117.

197. The isolated protein complex of claim 192, wherein said second protein comprises an amino acid sequence selected from the group consisting of SEQ ID NOS: 4-26, 55-86, and 118-138.

198. A method for making the protein complex of claim 192, comprising the step of providing said first protein and said second protein under conditions such that said first and second proteins contact each other.

199. A method for detecting, in a sample, a protein complex containing FHOS and a polypeptide selected from the group consisting of mRNF23, mERp59, mBRD7(621), mSPNAl, mVCP, mSTAT5A, mTAKEDA009, mPTRF, mAK031693, m1200014P03Rik, mNNP1, mLOC213473(195), mGOLGA3, mMYG1-pending, mAK044679(668), RS21C6, KIAA0562, COPB, MYH7, KIAA1633, KIAA1288(1191), mVCL, and mBC028274(908), mBC026864(777), m5730504C04Rik, mMYH9, mp116Rip, TPM3, MYH6, mMBLR, mZFP144, ZNF144(294), 14-3-3epsilon, BF672897(87), mCATNB, mCATNS, mSWAN, m2300003P22Rik(248), mTAKEDA015, PCNT2, KPNA4, MAPKAP1, mTPT1, mAK014397(679), mHRMT1L1, HRMT1L1(241), SAT(204), BC023995(305), TTN, mLRRFIP1, mAPC2, mCYLN2(1047), mACTN3, mDTNBP1, mTAKEDA013, m14-3-3g, m14-3-3zeta, 14-3-3zeta, m14-3-3b, m14-3-3theta, 14-3-3theta, mSPNB2, BC020494(124), MACF1, MYH1, mPPGB, mZYX, mPRKCABP and mMYLK comprising:
contacting said sample with an antibody selected from the group consisting of an antibody specific to said protein complex, an antibody specific to FHOS and an antibody specific to a protein selected from the group consisting of mRNF23, mERp59, mBRD7(621), mSPNAl, mVCP, mSTAT5A, mTAKEDA009, mPTRF, mAK031693, m1200014P03Rik, mNNP1, mLOC213473(195), mGOLGA3, mMYG1-pending, mAK044679(668), RS21C6, KIAA0562, COPB, MYH7, KIAA1633, KIAA1288(1191), mVCL, mBC028274(908), mBC026864(777), m5730504C04Rik, mMYH9, mp116Rip, TPM3, MYH6, mMBLR, mZFP144, ZNF144(294), 14-3-3epsilon, BF672897(87), mCATNB, mCATNS, mSWAN, m2300003P22Rik(248), mTAKEDA015, PCNT2, KPNA4, MAPKAP1, mTPT1, mAK014397(679), mHRMT1L1, HRMT1L1(241), SAT(204), BC023995(305), TTN, mLRRFIP1, mAPC2, mCYLN2(1047), mACTN3, mDTNBP1, mTAKEDA013, m14-3-3g, m14-3-3zeta, 14-3-3zeta, m14-3-3b, m14-3-3theta, 14-3-3theta, mSPNB2, BC020494(124), MACF1, MYH1, mPPGB, mZYX, mPRKCABP and mMYLK.

200. A method for selecting modulators of a protein complex formed between a first protein which is FHOS or a homologue or derivative or fragment thereof and a second protein selected from the group consisting of mRNF23, mERp59, mBRD7(621), mSPNA1, mVCP, mSTAT5A, mTAKEDA009, mPTRF, mAK031693, m1200014P03Rik, mNNP1, mLOC213473(195), mGOLGA3, mMYG1-pending, mAK044679(668), RS21C6, KIAA0562, COPB, MYH7, KIAA1633, KIAA1288(1191), mVCL, mBC028274(908), mBC026864(777), m5730504C04Rik, mMYH9, mp116Rip, TPM3, MYH6, mMBLR, mZFP144, ZNF144(294), 14-3-3epsilon, BF672897(87), mCATNB, mCATNS, mSWAN, m2300003P22Rik(248), mTAKEDA015, PCNT2, KPNA4, MAPKAP1, mTPT1, mAK014397(679), mHRMT1L1, HRMT1L1(241), SAT(204), BC023995(305) and TTN, mLRRFIP1, mAPC2, mCYLN2(1047), niACTN3, mDTNBP1, mTAKEDA013, m14-3-3g, m14-3-3zeta, 14-3-3zeta, m14-3-3b, m14-3-3theta, 14-3-3theta, mSPNB2, BC020494(124), MACF1, MYH1, mPPGB, mZYX, mPRKCABP and mMYLK or a homologue or a derivative or a fragment thereof, comprising:
providing the protein complex;
contacting said protein complex with a test compound; and
determining binding of the test compound with said protein complex.

201. The method of claim 200 wherein said test compound is provided in a phage display library.

202. The method of claim 200, wherein said test compound is provided in a combinatorial library.

203. The method of claim 200, wherein at least one of said first and second proteins are provided in the protein complex as a hybrid protein having a detectable tag fused thereto.

204. A method for determining whether a compound is capable of modulating an interaction between a first polypeptide and a second polypeptide, said first polypeptide being FHOS or a homologue or derivative or fragment thereof and said second polypeptide being selected from the group consisting of mRNF23, mERp59, mBRD7(621), mSPNA1, mVCP, mSTAT5A, mTAKEDA009, mPTRF, mAK031693, m1200014P03Rik, mNNP1, mLOC213473(195), mGOLGA3, mMYG1-pending, mAK044679(668), RS21C6, KIAA0562, COPB, MYH7, KIAA1633, KIAA 1288(1191), mVCL, mBC028274(908), mBC026864(777), m5730504C04Rik, mMYH9, mp116Rip, TPM3, MYH6, mMBLR, mZFP144, ZNF144(294), 14-3-3epsilon, BF672897(87), mCATNB, mCATNS, mSWAN, m2300003P22Rik(248), mTAKEDA015, PCNT2, KPNA4, MAPKAP1, mTPT1, mAK014397(679), mHRMT1L1, HRMT1L1(241), SAT(204), BC023995(305), TTN, mLRRFIP1, mAPC2, mCYLN2(1047), mACTN3, mDTNBP1, mTAKEDA013, m14-3-3g, m14-3-3zeta, 14-3-3zeta, m14-3-3b, m14-3-3theta, 14-3-3theta, mSPNB2, BC020494(124), MACF1, MYH1, mPPGB, mZYX, mPRKCABP, mMYLK or a homologue or derivative or fragment thereof, said method comprising:
(a) expressing in an isolated host cell in the presence of a test compound, a first hybrid protein having a DNA binding domain fused to said first polypeptide, a second hybrid protein having a transcription-activating domain fused to said second polypeptide and a reporter gene, wherein the expression of the reporter gene is dependent on the interaction between the first polypeptide and the second polypeptide; and
(b) detecting the expression of said reporter gene.

205. The isolated host cell of claim 204, wherein said first protein consists of an amino acid sequence selected from the group consisting of SEQ ID NO: 1, 2, 3, 51, 52, 53, 54, 115, 116, or 117 and said second protein consists of an amino acid sequence selected from the group consisting of any of SEQ ID NOS: 4-26, 55-86, and 118-138;

206. The isolated host cell of claim 204, wherein said first protein comprises an amino acid sequence selected from the group consisting of SEQ ID NO: 1, 2, 3, 51, 52, 53, 54, 115, 116, or 117.

207. The isolated host cell of claim 204, wherein said cell is a yeast cell.

208. The isolated host cell of claim 204, wherein said cell is a mammalian cell.

209. A method for modulating the function or activity of a protein complex in cells of a specific tissue of a mammal, said protein complex having a first protein which is FHOS or a homologue or derivative or fragment thereof interacting with a second protein selected from the group consisting of mRNF23, mERp59, mBRD7(621), mSPNA1, mVCP, mSTAT5A, mTAKEDA009, mPTRF, niAK031693, ml200014P03Rik, mNNP1, mLOC213473(195), mGOLGA3, mMYG1-pending, mAK044679(668), RS21C6, KIAA0562, COPB, MYH7, KIAA1633, KIAA1288(1191), mVCL, mBC028274(908), mBC026864(777), m5730504C04Rik, mMYH9, mp 16Rip, TPM3, MYH6, mMBLR, mZFP144, ZNF144(294), 14-3-3epsilon, BF672897(87), mCATNB, mCATNS, mSWAN, m2300003P22Rik(248), mTAKEDA015, PCNT2, KPNA4, MAPKAP1, mTPT1, mAK014397(679), mHRMT1L1, HRMT1L1(241), SAT(204), BC023995(305), TTN, mLRRFIP1, mAPC2, mCYLN2(1047), mACTN3, mDTNBP1, mTAKEDA013, m14-3-3g, m14-3-3zeta, 14-3-3zeta, m14-3-3b, m14-3-3theta, 14-3-3theta, mSPNB2, BC020494(124), MACF1, MYH1, mPPGB, mZYX, mPRKCABP and mMYLK or a homologue or derivative or fragment thereof, said method comprising:
delivering to the specific tissue, a selected compound for modulating the function or activity of said protein complex.

210. The method of claim 209, wherein said compound is an antibody.

211. A method for screening to identify compounds that activate or that inhibit an activity of a protein complex formed between a first protein which is FHOS or a homologue or derivative or fragment thereof and a second protein selected from the group consisting of mRNF23, mERp59, mBRD7(621), mSPNA1, mVCP, mSTAT5A, mTAKEDA009, mPTRF, mAK031693, m1200014P03Rik, mNNP1, mLOC213473(195), mGOLGA3, mMYG1-pending, mAK044679(668), RS21C6, KIAA0562, COPB, MYH7, KIAA1633, KIAA1288(1191), mVCL, mBC028274(908), mBC026864(777), m5730504C04Rik, mMYH9, mp116Rip, TPM3, MYH6, mMBLR, mZFP144, ZNF144(294), 14-3-3epsilon, BF672897(87), mCATNB, mCATNS, mSWAN, m2300003P22Rik(248), mTAKEDA015, PCNT2, KPNA4, MAPKAP1, mTPT1, mAK014397(679), mHRMT1L1, HRMT1L1(241), SAT(204), BC023995(305), TTN, mLRRFIP1, mAPC2, mCYLN2(1047), mACTN3, mDTNBP1, mTAKEDA013, m14-3-3g, m14-3-3zeta, 14-3-3zeta, m14-3-3b, m14-3-3theta, 14-3-3theta, mSPNB2, BC020494(124), MACF1, MYH1, mPPGB, mZYX, mPRKCABP and mMYLK, or a homologue or a derivative or a fragment thereof, the method comprising:
(a) measuring the activity of said protein complex in the presence of a candidate compound;
(b) measuring the activity of said protein complex in the absence of the candidate compound; and
(c) detecting the effect of the candidate compound by comparing the activity in (a) and (b).
